United States Patent Application Publication US 2007/0237770 A1 - sequence listing, part 9

SEQ ID NO: 902 - DNA, 90739 bp, Mus musculus
  misc_feature (1)...(90739): n = A,T,C or G
ctgagtggccagacgcacataacagcaatgtcaggctgtggtgtggcctgcgggagcaggtgagttgccagggtagggaagggacacatgcaagggaactgaggaaggtgggtcatggtcctgcacatccattctgaaactggagcagctgcaatcatccataccaggctcctagaggatcaggtatctgccattcccacgtaaagaggaatcatggaacccttaccctggcatccagacgctccatccatcctgtgataccatgtccctgctcatgaccaatccccagcgacacatgtgctacattacacacaagtcggggcttcatagggtggagcaggaccctcagcttttgagagcctcagcatgcttgggggaggcttcccagtcttgtcatttccggagagccacccgtgctcatgtaggtgccacagcatgctcattggctcgctggccttgggtagagtcctttggtctgttggtgcatgtctcctatcgccaatgaaaagacatacaatgggagggctcctctctttgactcttgaagagggtacagctcagagaggctaagcaattcagctgaggccacacagctataaatggctgaaaacaggaatgaacccaggccatcctgctgccatcagtgcagattctaggctatccctctctactctcatatcctgtggtaaataaattatacattattccccttacttctcccgggcgcctgtagcctggcataatttggctactgatcttatctgtgtgttcatgtatcttgacccacatgtatctgtgagtcaataagatttccacatcttgggccagagagatggctcagcggttaagaacactgactgctcttccagaggtcctgagttgaaatcccagcaaccacatggtggctcacaaccatctgtaatgggatctgatgccctcttctggtgtgtctgaagacggctacagtgtatttacatataataaataaataaataatttaaaaaaagatttccacatcttattgacccacagaccacagtggtggaaatcaaaaggaaatcagaaagatccatttcccagttccctgacccttgcatatcaaattcagctttcccatctgctgtcgctgtctgaacatgtcctcttcaaagggtggtcagggactcagcatgagccttcatcttccctgagagtgaggtgtgaggccccaagcagagcccaagctgtctgacctcattcatagcccccagaaaccttgtgccgtggtccacagaggctgttctgtccgagctttcagccacagggatgtcagccctaatgtccagcagaattagtctgcactgtggtctctgactccaaaggacagcctctggtggcatttcatggagtccacagaggaactggtccagatccttcttgcactggctgtgtgcagctttgcagacagacccttgttcccacaacaacctcttccctaatcattcactgttctcttcagagaggacacatagcttatttccagtttttttttttttatttgtggtgaaatacacccaagattgaatttactgtcttaaccattttaagagtgcaatccatggatgttaaatccaatctggtggctacacatctgccaccaccacctgcctgcatgacgccccttgtcaaaccacagatctagacccgttaacgagcaactcttcgtctctattccctgacccacacccccagctctgggccaccccgctccactgtctctacgtttttgaaccacttttaaattgtgatagtatgaagtgagaccagagatggggctcggtcgataaagtgctcgcctagaatgcacatggctctgggtgtcacccaccgcaattccagcactcaggaggcagaggctggacaaccagaagttcataactacccttgactacatggcaagctctaggccagcctgggctatctgagattctctgtctcaaatacacacacacacacacacacacacacacaagcacaaatgaatgcaaaacatgcttattgttaaaacaaaggatcagtgtagcgatgcctaggaaaatgtttatgtcccacactccacccaagccacaatccagtccagaacatgctgacagttatcatcaatgacctcctaggttcccagctatggagtgtgtgtgtgtgtgtgtgtgtgtgtgtgtgtgtgtgtgtgtgtttgtgactttgctattatcccaggatgtgcagagcccaggagcggccctactgaagctcacctcctacccttgcctcattacctttcccagggtcatatggaaaaatagaggtagcagagtgtcctccatcccacaggatggtcaagggaacctctgtgagaagtcttgttgttcatacgtgtacacaaagtcacaaggaagggttgtgactggcagggtgtgtcggcctttcacctagagaatgtatttatctagtgaaggctagctgggtggattaatcatcgttcccttacaaaagcaattggtgggtatgaaggcagtttccaccaccctcagttgttcaaggtagtgccgtccaaccaaccccccacatatgtgtctttatgcgtgtgcttgtcggtgttgacttgtgtgtactcctggggctgcagggccaccatgcactgtgggagacatgtcaagaggttcccctaacacataccttccagctgcattgacacctgtccattgactccgcatctccaacaacgaaagtgaccgtcattcttcactgtcaaccagttgagggaacagtgacctttagtggtgatctgtggtgattgctgagaccagcgtttttactgcttgaacgatgctgttgttttttttttttttcctccccgttttattccctgcttttacttattttattggaggtacttgctacatattgtgggtcatgacccttttttatgtgctgccaaatatctctgtgcctattttgttatcaagcattccatcctcaaatgaggaatattctggtgaaagagttggttggtggagcaagtaatgggagattaaactttcttttctccagaattataggacttaaacctcaagaattcaaaaatctgcaaatatttttataatttgctattttctttttttttaatctgtgtttggggaggggggttctgttctatggttacttaattttttggatagtcaaatgtattgaccttgaaagaacactgaagtccaactggggctttgaaagctactttccaatagcattacaaaaatcttccaacagccttggcattttcacgagcttgtttctaggtcatgtctgtttgcatgagatttcaaaaagggcctcactatgtagcccaggatggcctcaaacttgggattctcctgcctcagcctccccagtgctcaggttacaggcacatgctgccatgcctggtatcccagttggttctgaatcaagttatctaggaagaggaacctcagctgagaaaatgcctccatcagattgcctgtgggcaagtctggagtacattttcttgattaatgaatgatgtgtgagggcccagtatgctgggtggcaccatccctgggcaggcagtcctgagttgtctccgaaagcaggctgagctagccatggggaggaagccagtaggcagtgttctccatggcttctgcatcagcccctgcttacaggttcctaccccatgtaacctgagagctataaaatgaaataagtctttcccgcctaggttgctcttggccttggtgttcaccaaagcactggaaaccctacccgagactcctggctcatttataccttcaaccagtttcaccttctgggcatccgtggtgggggaaccctgcctgctctcgggtgccattctgccgtttacctccctcctggctctcagccaccacttcccatgtcacttacgtcattatctgtttgttctcctcatctggctggatgctcagctccacaaaggccaggaccctctctgcttcctgatgttcctatgtttttatttttatggtgctcgcagtacccagagcagtgtctgtctgacacatctcgggctcttctaagtacctagtgatcgaggggacacacgagctgtcccctttatttgaatactccaacctttctctggcagttgggaatcccctcttcggctgccctttcagcttctcctgtggttattggttggttcggcgtttctccttctccttctagttttgtgtaatatcattccctagaatatcgtcagttttcaaatgcattgtcgacgtacaaagctacattccaattctcttacatcttaaaaagtttgcatgtgtgcatctgtgaaagtcacctttctcagcgcttgtctgactttgcttttcgctctctgtctcatttgctggtcgcagtctcgggtgtccgtctccgccatcagggcacagcgatagcgtcgcacgcgtggctgctggtggctgcttcatgtgctttattctcttatgtttgctttgggctttattcatttcttccctttgggctattcagggtggtttttttttttttcaatacaagagattgaacccaaaagccttacatatcgtaggctggtggttctcagcctgtgagtcacacaaccctttcataggggttgcctaagaccatcagaaaacacaggtgtttatattaaatagtcataacagtagcaaactacagttatgaagaggcaatgatgataattttatggctagggggtcaccagaactgaggatctgttttacggggtcacacagctttaggaaggctgagaaccactgccccagacaaaggctctgcccctgagccacaatcccaaccccccagagtcttctattgtgttttgagacagtgccctgctgagttgcctgttctgctctccaacttgctatccccctgcctctgtggctaccacttcagctctggtgaaacccttaacctgcatctccttgtcccctctcctctcctctcatcacagaaagcatttgaggcttgcttttcctctgagcatagaatgacttgtgcccacaaccttccaaacagtaatgttctctttctctctccagttcccttagcttcggtcttgatgtcccctttattcaagtcacttagaaagtgtctcggcaccaccatgtgtgcctctgacttgctgttttgatttcgatacccagacgtcttctggctgttgcctggagagatgctctcaggatcttcgatgctcgcatgctttggaagtggagagttgtcttgccatatttgagcaaaaaggcatcttacctgtgtctggggtctgtgtaaagggatatgtatagactctgtccctgtgacttcttccctgagctgcttctgtgtcctatctacactcacaggtgacacccaggattcactctccctccctatgtagtccagactggttttgaactcacaatccctacctcgatcccctggccctgggatcactggtgtccaggcaccataatacccctgcttgccccacagttctatgattacactacctcatttgtctcattagggcaaaggccgggctctagcctatgccttcttgtggaaagaggcctcaagcaaacacaaaatgccctacttttctctgcccggcatttctgcttcattctgcagtgtgacctgccaggactctattaaagctcttgcctgcttaaccgttttctcttagatttctctcatcagtttgtcttatttccaaatatatggctgggtttatattttcttttaccatcctggtctcttagcttagaataagataattgaatctatttgcattattgaattcattaatacgcttggctctcttgacgtcattcctcacatctctgtttgttatccattttccttcccagctagctttagttttactgattcctgccatattgaataatctgtgtccctgctttctctcccatacttggcaattaagaagtctgtcttattttttccttgagaaatacccataaatcaaacatacgcatttgttcatatgaagaagtaagtttctgatttccagtagtgtgtccccatcctggcagatatttgtcccgaagccaccatgcacactctgcttgtatttctcctgttttctgttcttctatcttgtcctctctcgaatgacttattctgatactttttttgtttgattttgttttgctggagtaattccttgggtgacttaaagaaaagattaggtgctggcctctgattttagtatttctctctctctatttgaacctcaatggatctcagggggttttaagatccatttttccctcaagctgcaaagtctttaccctgtaacgcactggcagtcagggtaggagatatgaaacccagtgtgggctgcccagcttttattgtcatccagacacaacctcacctgggaagagggaaccccagttgaggaatttcccaggtcagatgagcttgttcatatctgtgagagactgttttgtttcaatgtgggagggtccagcccactatgagtggcaccatccctaggtagggaggtctgggctagaggagaaatgctaagcacaagacagcaagcgaggaggtggttttctgctccatgtttctgccttgggctccctgccttgaggtcctggcctggcttccctcaatgataaaccatgacctgaaagtgtaagatgaaatagatacttccctccccaagtttggttctgggtgttttattacagcaacagaaagcaaaccaggacaagtatcagtgtaggttctcaacatgaatacagagactttcaaatactagctttcccaatctcctcaagatagcgttcatggaagctgaggtgctccctgctctgggaagggagcacagcagctccacagagtatctggagtgtgtgtgaggtggggtggctctgctgaggattggctcacgattgtgtaagaactgtcgcacaacaacccgtgactggcagaaacggcaggcacggggtgctgaggccagaggagggaatcacaggaacttagtgtgtaaggtgctgagaaggggatggatctttccagaagcttctgtgatgtctgtcaatgtcatctgccccagccccagctactggctgaggtgtaggggacagaggtgtgtggccctggcatctagtgcttccctcccacccatattggtccctttggagactcagaggatgtgctcccaggctgaactttgtttcctgacttgggagtgggcctttcctattcccgcctaaagcagttggtgggatgcgattgggctttctgtggtccccactcctctgagtcctcagactttctggccagctggtatgactcaggatctcctccaatttgtaggctcttttttgttttagtggcattttcggggagaagaggcagaccactgagccctctctgtcatctagaaacttgggtcttggggatgacattctcaggtgactaatatgcagatgtagctggacagctactgaggaggactgtgagtggctggtgatgggatgacgaagccggtctccatgcttcagctcatcctaggtcctccacaagccacaccccctcatgaatcaaaaccatctcatgaccccagtccccgggcagctcaagtcctgcctcctcctctagcaaacctcttttcctgctgactcctgcttcggtcatgactcctcagtgtgcagtttcttgatggtccctgttcaggaggttcaagggctgagcttgaaacaccccccacatccagacaccatcagaatcgactccagtgtggttcctctgaagacaaggaccaaatcttgtccactttggcaactgctagccagctggacccattaaatgaatgaacgaccacgtcgggttctaaaaagaattgtcacacattgcgtgggggattcccgctaggggttgcatgtgattcagaggaaacctgtctgaatatcacaccgtctggaaggactctcagctcctggtgtctgcacagaggacacttgcttatcgaaagagaactgtagcaagcgggtgttgggtctcgtgggcggtggacctcatgtccagtgtggtgcgagtttgatgagtgggagaagcatctgaccaggtagacatgctgtgggggaggggtgtgatgtctgaaacagtctgaggagggcttggaggtggggcctggcctgtgggtgctctggggtctcggtgggaggtatcaggtactcctatttttttttttaatacttgcagtggactgggagatcagacttggagttgatgggacatggcaaagctgtgcaatgtctagatggctctgttggcagactcaaataagttaccacagggagccacagagccagtcctctctaccatgccactcttcggagttgaacagcagcaggtgtggtgagaggggacattggagacctcaggtgatctctgtgttctgtagcaatcatctgtgtggagtggttgccaaggacttacgttctcacaaagcatggtgccgaggacaagcaagaggacagtgccacaggcctatgtgcaggttaccccacattactacactccgctctgggacagagtccggggaaattatgtgggttgtgccacatgccaggcgttgttctcggcactgcgtgcacggtgactcaccaaagctcagaaagccctcaccattctcagcctccttttcacacacagtgacttcacacaccacggaggtcacaaagagaaggacgtggaccagaacctagggtatcagagccttagagatcacattctcagctctcacaccacaccatcagaagcagacaaaccggacggagagtccaaagagcgtggcatgcctaggacgctatgcggcacacagctaaacgactcgggttttctgctttaagaagtgctttcctctgagcttcctggtttgagccttatgacagctgccctggtgcctgagccacatcgcttgctcatccatccatctgctcaggaatctctctggagctcctgtcctgccctaggcttcccttggctcgaagagtgttttgtttagtaacttggaaaccacaatgcactcctttgccccccgcactgttccaagcatgttagttttcacttgggctagcagccccctcagggtaagtgattgtgcgccatacccatgggtcagcttgcttctataggtccctaggctgtaaccatgtccttaccactaaggcacccaatcacgtctgcagttggcttaggttggcattggatgtgggtaaactgaggagtcaaccctgctctggggagtgttatacctttccaatctcattcttggattgatgtaacctgagtccctgtggttggtgggggggctgaagttctgttcccttgctggttttcagatgggcagtccttccgagttgctagctgctgcctctgggtccttcccttccacatgatccttccaccttcaggccagcaagcgttcatagagtctgactgatgccagtccctctaacttgctcatctagaaccaaacagaaaactctacctttcaagtagacttccctcgagcctgttcaaggtcaaggatgccctgacacagaccccagtcatctgtcattgtccaaaaactgtactccaggatttggaaaccttgaggtccaccaggagccctgcccatccgcctggtaaaggatgacactcagggaagtttagcatagggcaaaggaatgtacagtgtatcatcccagagccactgtatcctactatctccctgaggggacatgggacagaaatgcaatttggagagagttcagggctgggataaagcagggattgttctgtacctaaaattgatctagaaaactccctgaccatggcttccgtcttccccacttttgtaggatcagaggcacaaaccaagctgcctcgaagtagctcatggaagactctggagagccgctggccaggcacgctaccccttcctcagggagaagcagcgtgtaagcagaggctttgtggccggagtggacatgaatgctggcttccagagagagcagcgcttcagttttggtcatcggaagtggtgcctgcagcgcaggtaagaagctccagtctggtttgccaactgccattttagctggctgtgttcttctcttaaaaccttctgtctggagagtggccatcacctgtccttgccttccctgacctctgacagagctggtctggaattccctggtgccttgattaggaattccagccttcccatgtctccgcccctcagtctccacctcacctctgctaaaggacacaacaatgtctcacaaggacccaggcctctgatatattaacctgtttcccaggcttgtccttccatgcccaatcctaagtcaccttcataccctgccctgtcataaagcccctgcccggaggcatggaagggtgtcaggtctggcctctcatgattacctggagagttccaaactctaggggctgagtacataggcaagtgaggtccctgggctcctatatgtgtttgcatgcatatctccatcttgggcgttaggagtgggctgtgacatgggtgggggtatggcatttggaagctctttgggtaagagttaaatcctagggtgttttgtctgctacaagctatgtcatcatcatcatccaaggagctggtagggctgaaggagagagcacctgctttcaaaaaggaaggaaggaaggaagggagggagggagggagggagggaggnnnnnnnnnnnnnnnnnnnnnnnnnnnnnnnnnnnnnnnnnnnnnnnnnnnnnnnnnnnnnnnnnnnnnnnnnnnnnnnnnnnnnnnnnnnnnnnnnnnnnnnnnnnnnnnnnnnnnnnnnnnnnnnnnnnnnnnnnnnnnnnnnnnnnnnnnnnnnnnnnnnnnnnnnnnnnnnnnnnnnnnnnnnnnnnnnnnnnnnnnnnnnnnnnnnnnnnnnnnnnnnnnnnnnnnnnnnnnnnnnnnnnnnnnnnnnnnnnnnnnnnnnnnnnnnnnnnnnnnnnnnnnnnnnnnnnnnnnnnnnnnnnnnnnnnnnnnnnnnnnnnnnnnnnnnnnnnnnnnnnnnnnnnnnnnnnnnnnnnnnnnnnnnnncttagagcaggcattttctcattgtgcagagccagggccggggatgtaagtcacctcatgggcagcattgctgcagctcacggatgggggtggatgggctttgatttcagccagcagctcctcagcacgcccagcccagcatgcctgtcctgaccagaagcgtcctgtggagatagaaaaacccccaagacccaagaaaaattaactacctgagcctcatttggatgggggatgtttacagtggtattgaacctggggctatccctgagttcaaatcccagcactaacagttactggtgttagtagattttaattaggtattttcctcgtttacatttccaatgctatcccaaaagtcccccatacccacccccagtagattttttttttttatggtttggaaacatgttatagctccctctcccttgcctcagtttcctctcttgcaacacaggagaaggtggtacctgcctcacaggggcaccacgcacatacagatgaggccttattaaaacacggaccacccacctggaagtccttcctaatatcccctactgtgcaggcaactcagccaccactcaccctgtgatagatctgctatgctgtaccacctggtactggcacaggaccctaaagtgaagggactggtcctctctatacacaaggcctggtacttcatagatgagtttaagtcctgaaaggaaaaagagaaaaatcctagtgaggctggccttgtttatcctttaaaatatgtatggacagacactgagcacagagaggttcagtcatttgaagacagtcacacagctcgcaggggtagaaactctgtctacaatgaatcaactcttttactgttccactgaaatgcttcctgaagaaaagactgtgagtcagttactcctcctccagcagtaagtggatgactagagtatgactggagagccccatcaccaagggtcccgttcctcggtctcctgcagcaccatctgctctattgactttgcatttgttttcaatggtgcacatgacaacttaactgcaagttggggggagggtccttctcctctagcagcctcagtgatcaaatacgtgaccagatattactttggaggtagattttgggtgtaataaacatttaaatcaataggctttggataatgccagttacacaacacagcaaggacaggcttcatctaataagttgtggaattcgaattccaccacagtggcgatgatatcagatctgccggtctactggccnnnnnnnnnnnnnnnnnnnngtgcacatgacaacttaactgcaagttggggggagggtccttctcctctagcagcctcagtgatctggtccacaaggtggacgtgggttcttgagtaacctagaactgaagctccgaggagcacaggcagtctgggggaccacccgggactctaccactcctggcatgtgccctcccctacttcatgcccaaattcctagtagtccacatggactctgacagctgggggatggggggacaatctgcagagggagccctgcccagcagcaaatgagcctcagctccagccagaaatctggccccgccgcttcccgcactctccctggggaagaaagcacagtgattaatggagttctgactcagagctgctgggggatccaggagatcataggcacagctggcccactaggaagtgggctgggctatgtggcatccatgcagatgaaggatgagggtccaggatggcaggtgtgcagtgtggcagcctccactatgccagggatccagttagctggggacacctgggctcccagcagggcttggagtcatgcaaggtaaccaggagtctcctcaggagacctaacctgggcccatctccagaataaggtgatttctgaatgagtggctgcaggccagaactaacatgaaactgaattgggaaatgttttcccagcaaacaccactgccactggttttcaaattttcattgtctgagaagccatttaaaatgtcgtatcttgtatgaaatgatgatttaatgatcaggataaagcgagtttattctttaatctttttttaagtttcaatctttaaaatggatttattatgaaagttcacacatagagtaataactatgctttgatttacaaaactttgacattttagactagggatccacaagctaagacctgtggccaccgcctgattgtgtaaataaagctttattgaaaaacatgctgttcgttcacatgcacagcagctttggctgcttccgcctatctaccctcaaagtctgagcaatagactctggcctttcgcagccactgtgctgactgcagtcctaggcatccacgatctttcttgtcagctgcagcttccccgtggccttctcttgtcttggttggcttgctaaggattaagaattaaggaattcaaaggttagaagatggataaatcacttgtcccaaaggcacaaggaccagagttcagagccccagcacacatgtaaaaacctgggcaggtgtgtggccacctgtaaagcaagcgtttggaaggcagagacagggactctccttggcaagatggctagctacactaagcagactcggcaagtttctgattcactgggagaccctgcctcagtaaacaaagtgggaagtatcaagaaagacagatgacacccacgtagggcctctgcatacttcacacatacacgtacaagtatacacacacacacacacacacacacacacacaccatgaaaaaaaggttaaaactaggaggctggaaacccttagtggttaaagcacttgtgcatgcatgaggtctggagtttaggtccccagaacccatgggaatgtcagtgagtgtggcagccccttacgtaattccagccttggacagtggaaatgggatcccatgggcaatctggttagtgagattagccaccttgatgggctctggttttgatggagagattctacttcactgaatgagatagaaaagtgactgaaaatgatttttgatgtcaatcttgagcctctgtatgtgtggctacacacatataaatacacacacacatacacagagagagagagagagacagagacagagagagacagagagaattacaaagaaaacaatccaaagtcatttcaatagaagatataagggttgcattttccactgtgtactcatctgtgctatggggcattccacgtggactacaggagttccggtttgcatcatcaacagtatccaacagctgtttgaattccttcttgctacaaatgccattcagacaggaggcccacactctccatacttgggaacttaaccttgtggctctgtcccttgtcaatgcctgtgtagactttcaaacctatagattcaatcctgaatctatccagcagaacaaaggcacccaggaaagagttcaaactcatctcagccctgtaggtcagtcttccctgaccccattccaaagtgcatcccagccagcctaagctggggacgctttcccagtgctgcagtgcactggggaatgtgttaaaactggtccactttctggaacagtgctgataggagccaaaatgtatttttagcatttatgctgtagtgattggagagccacctctgaaagggctttagtggaacacagtctgagactgccctcagcaagaattggctgctcttattccactgcttaaggataatggaagagtaaaaggatgctgagtgtcctgttgagaggcctaagggaagggaaggagaggtagaggaagggagcgagagatcgtgggagcaatgggcagagagtcaagtccagtcttccagcaacaccagaggccctgtgactcctagcaaggcttctaatgtctccaaagttaagctctccagctgccttcatgacttacagctgcccacagagggcaaggtgcagatgcacttggggacagatgacaatgcacagagataaggaatggggacattaacagcctcttctggtacacctgtcagggccccactggctatgtagaaggtcatgctgtatcgaagggaaaggaacagcttcccttggagttcccaagctgttccttctgtatgcatttccatccccccccccacacacacacactgtgcccttcctccatggagtcagggcattaggaacctttgctacagggttctgaggaaccctgccttcatgtctgctctgattgtacgtgcagatttaagagcctccaggtggggtggcatctgtcacctctgcaccccaagtggtgctgcaaaggtttctggggggtagttagtgagcacaggtcattggatacaatgatctgtgaatgtggatgctttacaagtgatgaagggacaggtgtcagggtctagagaagaaggaggtgggctagggattgggcagtagctccaagcatttagccaaagcccacagagccaggaataaaaaccaggagtcctgacttccagaccagctgctgttgcctccatgggtgtgaggaagggaaggccaggcctggtggcttgggacactgtggactagcgagtccaccccctccccacagagaagacatttttaggttttgaagagatgacctcatgtttttcttatttacatagcctggattgtttatgtagtcatttaaaaataaccaatgtgtactaagcttagtctttgctctccaggctctggtggaagagccactgtgtggggagagacacctttttatctaagaaagggacagccttgtttcccaggacagacgggggcagaacaggacaggtaggaagcttcgtggttttttcctgtcgcttctccaaaataactccactcctgcttcccacttctggcctgactggacccagggtaggtctccttccgggcagctatgctctgtagattctccaggagctgttaggaagtctgtcaacaagcacatgcgctggatctgaagacctagattgtggcctggagggttccactcaagctggaccactggccctgcagctgagctgtgtgccattggacaggctacttaacctctctgtgctgggtcaaacagagagacaacagtgcagatgggagcagttcctgtgagaattaaatcaagaaacatatgtgaagggcctggctcattctgggtacatagtagcaacacatagtgtgtcttcgtaaaaagtaaccatgtttcctttgacatcttttgagaagaacaaactccatgctgggctcaggtggtgacagacaggctgacctggctgaggagtggaatacactcgctagagcagaagagcactaaggagttggagctttgtctcataagtcacatctccgagcatcgtccacagacggccatctccctctccccctcccctgctcctccctatacacacacacactcccgaattgcctaggtacttctttaacgggcagatctcaggctctgtctcagactaggggctaggaggctgcagtgagaggagctagaggcacggttatctgtcagaagaagactgtgatatttgcctgcagatgttgactgagatcaacatctcagatcagtgtcacctgtaagaggtgggtggtgggcctcgcctgccagactgatgttaggggagggagaatgaggcctcctcatgagaacagagaagggtagccaagctcgggcagagcaagtgacttgcccagggccacactgttaataagtgcagacatggggcatgctgattctggagtaggcttcctcttgtggtgccaagtggaggtgaccctggaagagccattgatcaatagacaggaaggcgaaaggtgagttttatgcaagcataatgaatttgagaggctagagggtgcagcagctggaaatgcagaggggtgtggggtgccaggcagatgggcaggcaggtggataagcaggcagatgagagagcaggtgaggtgtgcagctgcaggaattgctaaggaaaacaggaagaaatgagcctgggagacaagcagggtggaggggtgggggctgacaaaggaagccggagggaggaacaagcctcctgtgaagcaagtcaggtaagagacagaagagacagaccagggctcagagaggtgagaacaggacagggtggggtgcgcaggaaagatgggcggcaccgcaggtcacccagggaacttgctttgggcaccgctttagaaggaagccagccaagctgaaggaaactgtgccataagtaaataaaaatgtcaatcacgtggggcagggaggagagttgctgtttgcttgtgactgtgctcctggccggcatgggtgcagaaccacccaagtctcctgtcaggacaagctctgccatcttgcccccgttccggcactgttggctggtgccctggaattatccttcctgtcctctgctggacgggcctcagcaccatcctttccctccctccccagcctctcatttcatttggcagctgtcagtgggagcaaagcttgtccaaagggtttcgactgccgggccacccactggagagttagttatacagactcgggagattcccgggctgctaaatccaagaaagggtgtgccaggcaggcggggctgtcccagcagctcattctgagcagcctctctggggctgcctctgtaatcttgctctgtttgggggcatctgggtctaggtctggaaaatgggcccaaggccctgagagccacgtctagcactagcctctcagaacacaacaccacctgtcttcccttgatcctacacatggactaaaaaccaaactccttccctcccaacacaacactcacagggacacactgccacagtcagataggcaggctttcctgacatgcagcctgttagatacaaggtgacaagcactgatcctagtgacaaaacagaatgcctgtctctccatattccagtagagaacatagagtggggagttgaggacctgagtttggttcccagcacaaaccttcatacacacacatatacacagtcatatactcgtgctcacacatacatgtatgcacacacatgctcatacacaggcatgctcatatacacatgctcacacatgcatgcacatacctgtgtacacatacacgctcacacacactcgtatacacatgctcacatgtgcatgtgcacacatacacacacaacacacaaagaaaaggtaaacacttacacacttataatatttgtgagttcttgcagatataaaggtgcacacaataaataggtatgctttccttaagtagaacagagcccaccagggtcagctgtgcagtgagaaggtggcatggggttagcagatcatggtaagttgggccaggcagcgacctgagcaggcatcaagcagcctgggtgggtagtgtctgagtatggaaccaagggaagtgtgggtgccagttctgtggacagctgggcagagcccggggcagaggtgacaggaacaggaggtcacagtatgactggagggagaggcagtggagagcagttcacacggagcagcctgggaggtctgagctgagctgagggagcggtgaatgtgctgtggcccacctgctgtggcgtggggacacctgcattagggtggggtagagtgacagcaagaggtccgtgcctgaatgacacagatgagcacagctactgcaaaggccatgctggggcaggtctctggacagtgtgggatcccaccagcatgattcactgagatggacactaggcacagaagagatttttattattattatatatttttttaaaccaggaaagcccaccaacattcacatgcagtggtacttctcaggctagtcagtgtcaccaagcctcagcttacttatctgcaaaatggatctctggatagatagttccaagatcattaaaaagccactccttcagtctctggctctggggcctgtagtgatcagggaaggctttgaggaagtaggtggaccctgttcttaggaatgacttagaccaggtccaactaacaaggaaatggagaaaagagcagccaggcagaaaggccatgagaccaggagcataagctcggagcaccgggctggttgggaaggaggggaccaggaactattaacagacagacggcccccagctccccagtaccacagcctttaaagcagacctgcggggcctggggcctggggcctgggtttgttttgtgagcactgtggtcctccatttttaacattttcagacagacgtgctcaatcaggaaggaataaagcctggcttctggtccgccagagagttaacctcctggcctggcactgcataaccacagggtctgctgagcgcaaggagactcttctgtgtggcagccagagcggcaagcctggtggctctgggctctggcactgtcctgcagtggaacaaacagacctcccttcatagataatggcctcattgagtattgtgcccgtggccagtgcccagcactgggcagctcagcctgggtaagtttcctctcttggctgcttagcaaaatatttacactatgcctttctagtaagacagttcctgggagccagcaaacagagggagctagagaaaacccctcactccccatttcacccccacacccaccagggacctgctttccatagtgggggaaggctttgccacatacccagcatgtgtgtctggctccattgttgctcctcagggttccattgtgaagcaggacctagagctagaagaagctagaaggcctggccagcttcacttttctttctcctagtatcctcactagaagaacgtctgcctgatcttaagaggcaaacatgatgtggctggttgctactatcttccctactgctgctgcgctctctctctctctctnnnnnnnnnnnnnnnnnnnntctcctctctccccctctctctctcctctctccctcttcctctccctccctctctctctctcccctctccccctctctctcctctctctctctctcctctctctctctctctctctctctctctctctctctctctctctctcctctctgtgtgtactctgtgtggtagggggctttcaatgagaaaagagggtacattaccgccagctcactgctgatagtgcctgtcctcccaaaaggtccctgaaccagccaggggaacattcaccatgttgtcagaggaaaagggggcagtatctctgtcctcgacccagcagaaaagaggtcagagatggcctgtgtggtcctttggacagaatcaaaaccagtgagcaagcaccacatggctcatcaataagaagttgccttgagcattaggccccatcactgcggtacacaagacacacatcctctccggcccaggatcctacttcttccaggaatctggcttgtgaaacaacagcaccagcatgtaaagatgtgtgtgcaaaagatgtttgctgcaaaattccagaggcaaacgaacaaaagaaaatggttataaaaactcaaaagcaaagtcaagctcaaaggcactgcattccaagcctcccctgccgctcagcagtagcaggcagactatgagcctacttagaaaggcagtgtcacgccctggtgctggcttcccccagcctctgcggagctttccatggactcaggtgaagcccatgcctttttacccagggttcttccctgttaggctccttcagtagtaatctatcctttggtctcatcaatcccatcttacaggaaagaaaccacaactgagacccagcacttgccttgttatggcctggtgttgttggcaggcccgtcactcccctgggtcctggcactacctgacaaatgcagactttaacccaggtgctgcaacggggcagctgaactctcgtggtacggaggggaagccacatagcaacagccaagtgataagagcgaggcaaccagcctggagggagaaagtgggcttgacattcataaggtgtcacacgccccaggcaggcctcagggactagggcctggacatggaacattagtagaacatgagagacttgggaactgggtcagaattctttatgttaacagcaatttacttaattcaataaaaagtggtgctcttggtattcctggaatccctattgcttagaaggaggctgtgtttaagccagacagactcaagtcagtgtgaataacagtaacagtatacagtgggatgcatttctgatgggacccagaatggagatctccagctggcacagtgtcccaaacatgagctaatgccttaaggacaaactcacaggacattcttacaccctaggaaagccagatgcctaacacagagctggcatgaaatccagggaaggagaggtaggtggtggcttaatgaatggcttccaacttaaaataaccgggaagaaattgccttcttcatatcccagagccaaggagcactctgtccgcctgtggtcgggacactgagaccgtggcgctagctaggtagcacttctttgactaccagagagctgcacagtagagttaccatgaggggcattctgcttgctcacctgccattttcttctccctctggtctagatcttagatctcccagcttccctgagctgatcgagcctctgtgagtgagttgcaactgcagatcgataaatatggaattagctaattgatcaggtcatgacagacagcaaagagccaaagccttcttggctctgcttggtttattggggttttctgttaggagctcttctgttgaaaggatgcctgggctagagagggcattgaacaattggggtagtcagtgtatgtcatgcacccccaaatatgaaccaaccaatgagcttttagttcctctgagaggtaaggctcctcaccgagacccatatcgacaggctccaagctgctggcctttggtgccccgtctcctcaccaggtaaccagatcgttaggttcttttctctatggtctcagaccccagaggatactccgactacagtccatcagctcctaatcaccttcatcctgcagttcagtctccaggacccatatgtggaagaagaggattgattcctgcaggctgtcctctgacctctgtccaccacgacacatgcacatacatgagcacacaaacacaatgagggaatcaaaataataataataataataataataataataataataataataataataataaaagtgataaagggtatacattaataaaggatgaattttatggtatattattgcgtatcagtttatcccaaagtaaataatacttctaaagagtcacatttatggaaaagagactaggtcaaaatttagaaaaatttccagaagtggtggcacacacctttaatcacagcacagagcaggtgggtctcagtgagttcaaggccagtctgacatacacaatgagttccagaatagccagggctacacagagagactctgtctcagaacacaaagaaaagaatttaggaaattctacgtattaacagattaacatacccccttgttttggaaatcaagggttcggaattgaggtgacttttacaaactgtccgctctctgacatttccctttcttcatctacccattcattcccaaacacctacgcgtgcctgctcagtgtcagaacaagaaggtgattcagacacaggtccctccaacttctgtgaaaataatgagacgagtgcatgaacagtcacaagccacccccacgcgtgtgtgccacctatcactgagagcttctactgaagtgttgaatctcagcagctcatctcacagaagtggggagaagcatgggagttaccagagagtcagcagtcaggggagggacgtgatcagtgggaccagatcacagaagagctcctgggactctgtcatatggcagggtgactccagtcaagagtatgtaatgtgcatttcggaatagctagccagaggattctgaattctcttcatcatgaagaaggggtaacagaggtgcgggatggggtgatgatctgtgaccatagcattgtatgtatacagatcattaacactgtatgtaaacatcacaccgtagctgataaatatataaaattatatggcaaataaagtcaaatgtaggccaaaaagcattggcagctgtcattaccacaaacaggtgctgtaaaagacctaggctcgaaggtcaggtcccctggggcagtggttctcaaccttcctagtgctctgagtgaaggggcccagctccgttaccactcaagtgcaaagatgagaggtggctggtgccctggtgccctgcagggggtctgcggtggtcccgactccaagcccttgtggggtcatttctcatctccgctaactaccagcataccatactagttcaggctcaggacaggagagggagccagagatgagtcagatgccagacaggacccaggaaacatttggagtcttcagggagactgggactgtggagatacccagattcgtcccagctactgctgcctctgtcccctcatctgcacagtgggtgctaaggctctgcccaggagactgttgaaaagaactcaaaaggtctgatgtgatgcctagacagtgtgcttacaatctaaggacagacaaagttgtcatcaactggttccctcctaggaatgaatttaggtggaaacaagtgagactggtcagtgaacgctaaattactacactaattcaaggtaggaatgccctggttatcactggtgtcatggagtagtaggcctatccccatggagaaggggacagtggtggcctcaaggagaaattggtgacaagttggttttatctggagaaagaaaggaagaatggggaacaggcagctgtcagggaggggctggtcccctagcaggtagacagaaaggatagaggggctaggatgtgatttagaggtaggaggaaggaagcttggagatgacagggctggggtggacacactcgatggagtaacttgaggagaggcaggaaggtgggacaagctgagccagagcatcagtactcataagcactgagatccggcaggaagccggggccagggggagtcccactggggtaagccaggctggggataagaaggacccaaaatgtcttggcagattagacctcagaatccaactgtacaaagcaccctctttctcactgggggtggacctaactgggttgtcacctacctaactgggtaaccttcaggataggggcaaagccgggtctctggccaccgaaactcatacacaacgctgcagttttccccacgtttccttgcagatgtaaaggggtggtaacagcacactacacagccacctgtagactcctggcctcttgattaattgagtgtgaacctgtggacacgtacatgaccttagcttcctcatctgtaaaactgacttagaaacacaatctactgcacagacttgaggactgagtgtgccttgggtgcttagcagtggcatgctggctctcatcagctagccagcccatcagctagctaaccaatcagctagccagcccgtcaactagccagccatcagctagccagcccatcagctagctaaccaatcagctagccagcccatcagctagctaaccaatcagctagccagcccatcagctagccaggcatcagctagccagcccatcagctagccagccaatcagctagctaactaatcagctagccagcccatcagctagccagcccatcagctagccagccatgagctagccagcccatcagctagctaaccaatcagctagccagccaatcagctactcaacccaacagctagccagcccatcagctagccagtcaccttgctactggcctagctgctctgcagtttgttgttaggtacactccatctttcttaaaccaccagaccttcttcaacaggctgtctatttttttttctcctggtttgtcttgggcctgtcacagtagagaaaccaggttaatgttgtgatccatcgaattctcatttagattcattcattcatctgttcataatgcaatgggcaaccagcagcctgtgcttggggcattgggaaacacagagaattcccacagtgtacatctttggccccaggatcctcccacagcctatggcctttgccagagtagaattttcaaaatcacttggcttgggtggccaaaggatgtgtgtgtgtgtgtgtgtgtgtgtgtgtgtgtgtgtgtgtgtgtgtgtatttaaagcctcagaaaaccatacaggactccagcctcctgccccatgaggacagagcagaagttggaggaaaactgagaactgctcctgatggcatggcctgtctctaggggcttttagaactccaaagttgtcaaaacagaaagatctgggtcagggcctgaagtgagagttcttgacccaaaaataaggttggaattcagtatttattaagattaactgaagtcccatgggcctcaaggagctgtcctggctgtgccttggcccatggaatcctctacaatattacacttggggacaccaggccactcagtgtgaggcctgaggtaccactccttgcctgctgtcagcatcctgtaccatcttccacacagctggtttttagaaatcgctcttcttgcccctccttggcatctctacagcatcccctttaaaaagatagatggaagctccctctctccaccctgggaacccatgcccctgtcaggtaccagcttcagccttcttgttctcccagattcacccatcctttgatagacgccatctgtgcttctgcaaggcacatgaatgagatgagctgccctgccctacgctaaaagaactcactgtgcacggagagaaaagatctgaacaaataaggttccacctgtgagtaacaagagagagggcaccatgctcacagaatagagactccgggaggtcaggaaagctcggtggagaatgtgaggatggaatagcgtgttcatccgagtcctctgggaagcagaactaaaaggacagggacacacatgtgcacagccttataatacagataagcaaaaacaagcttgacattggcaacgagactggtgggtacaagaaactatagcttgtgacaaaggaaggagaagtacctgagatcgtaatagcatccactgtgtcaggcactggagacagggtcctccagacagtcccagaagaggaacaggggaaagaaagtgacactaagagggacagtaaggatggtgtcctttggctcctatagttgagattcagtaagtgcacagggtctggggggcagctccccatgacctgcagggcatagggtagtctgccagctgtcacttcaattgattcatcaggcccacccacgttatcaaaggtattctgcttcatgcaaagtctggatttaaatgttattctcacccgaaaaataacttcacaaaatcttctagaatgctgtttaatgaatatccaggaccatgacctatccaaactgacgtaggagattaactagcagggggatatgaaggatattgaggagtttgccactctgtcggagagacaaagaacatgacagccaactgaagcatcagcttatgctgggaacattctgaagtttacacagaaagggagggaacggagaggggtgttagagatacagccctgtggaagagacctggagactcagcaattaggcctgcctaaaatgagctttacagagtcctaaactgaggagtcagttatgcctcgaacagcctccagagcagcagctctcaggctttggcgaacctctgtctccaaaaatattgactttaagattcttaagagtaagaaaattagccatgaaataacaatggaaataactttatgatgggggggggtccccacaacaggaggaactatacttatgggtctggaacctgggatggaaacccttcccctccactacacctggtagacagcacactgactctcagttcccgtggctggcagaggatggaacctgactcataggctcctccgaaggccatccctgagacagagaggggaagaccagcgtgtcatgtgtcttgatcagtctgaactctgatgtcaggctcctgggagagcagggacccaggtgtgggagcatcagctgtgccacgaggtagacacctcagggttctgagatgatgcctctccagtagaagaccctctttccttttggtgtcctcactgctggagttccagcttctccctaggagtcatcatgacaagtagagaaggcattttccaaagaatgacatcacaatagctttgaaaacaagatagggagcctccccatgggccatgaatatgcaaagtcttaagaaaataggatacacatgagatgggtaaatagaaccagagccaaaagcatcacaacccagaacccagacatctaagtgatttccatcccagagatgccagccatagttcatgccaaacatcaacaaaggcaagagttggactggctgctatgccctccccacttcagaaagggaggttaggcccctcccataatgtgctgttcaggcagagacagccaaatcccatggagctaagtctcaaggccattctaagaggctaggggtgggtttagccgactccagaagatagtgtggggcagagagtgtataggtcactcactctcacatgaagcataccgcactggccacagaaacattcttggacaatagaatgtttgctgccaaacttcccataagtgggcctcactgggagacttgcttcacattctcacaaatgtccctgacatggcttccccatcccgttcaggcgtaacctgtcaagcagagagccagtactacaggaagcctagtgtggttgatgatttcatcagaatcctccctcttttctgtggtgtgagagatctgagcagaccccagggccagccagctaaagaccacaggtcctgtccttccggggagtgaggtgtgaccttgtgctagggtgagctgaaaagacctgcagtcccttctcaagcctctcactacgatgtggatatggtggtgggaacgggtagccatgcagtgttggggacaaaagagaaggcttaactatgctcttaccactcctcagctgacagaccagccctggcctctggcactctgaccatcacattagacgggagtaaatttctatcttgtctccactcctccttatgggagctcaagtccttacctcatgcaagcactgactttctagtgcagtccctgatgcataaccaagaccaccaaacagagaaccaataacatgaaagagaagaccaggatgcaaagaccagtgaaggcccatcccaggttagagccacctaagataaatcaaattagtgtgcttagcaataatgataatttattccattttaaaccatttttattatttctaatggtgtatatatgtctgtatctatgtctgtgtctgtgaacgtgactgcaggtgcccttggaggccatgagccagaggagtcagagcccctggaaacttgtctggtatgagttctgggaatcaaactcagatcctcttcaagaacagtgcccattaaccactggccatgtgtctccagccaagtttattttattaacttaaaggagccagtttctgtgaaaataggacgatgagagaaaaggaaatagttgtggaaattttaaaaatgtgacacctgagaaaatgttaataggtaaactgtatgacgcaatgggcgtgggtaaagaccaggtgacctggaagtcaaaaccaagaaaatcagttggtttttttctggtggtggtgaaggggaattgagaactaataaaattcagtatcaatcaaagaggagagcaagaagtaagccctcagacaatggggtaaagatgaagaatggctagaagcgcaaagtatgtagcctaagaaatgttctacaagttaaagaaatgtactcaggttttagacaaggaagagaacatggattcaggacagaactcagtataactgaacattccaattcattttggtgaaactccagagaaagaaaaaaataaaaaatatgtaggaatttatcgtgagtaatacaagacactctagccaagcattctgggcagtctttcaaaagtttggaagacaggactttgaggctaagagtcttactgtgtcaaatttagataggaaaataaaaacgtgttttacaaatgggaattgggaaagtttaccacagccccctatgctttctaggggaaaaaatggatctatacctatcaatcaaaaatttttgcaatattttgtaatttttgtcatttagaaagtctctaagacaaaaaaaatgtgttaagacaaagcagaatgaaacaaaaatgtctactaaaataccactgaattggaagctatttgcaattgctacccactggcttgggaaaatcaattttcttcaatgcaatgtgactggggacatcaaccactctccagagcaggcccatgtccaggaggaactggccaacaccaaatcaaaaacatttttaaagaatccaaaattgtgatgctattagattgaagaggcgaatggagaaaactgtaaatatttgtgacaaagtttccttgctgtagagtcacttgggcccattcacaccagctggtcccaagggcatgaatgataatacattcatcatcaagttgtgtaatcacttctcctagttgaattattctataggctaagttataatatggaagtgaacatgggtgtagggacactggacagtgtagataaagatacaatgaaagcatgaaggcagacaagagagtaaggctcagagagagctgggaactttcattgttcatagaataacttaggtgaatgttgggggagagccaatgcaaacctcccctcagactcagaaccagagtccagtgtggatggcttaattctatggattagaaagcattgtatgtggggaaaattaacagttgtagacgaaacagcccctagatcacagcagtactctctggtcttgatgcatttgtgattctgaacattggctgcatcatgatgatctgagcctcgaatgccccatcaacgtatgattttggaggagttcatttaagtagacagagagaaagctgattgcatctgtgtccctggcctcgtataccaactcctgaaccctaaaaaccttatgcacacacaacactggacaaacacccagcatgctcaccctactgagccacctgtcgtcttctgacctcgcccacagctacttcccctttctccttggtgcaatcccactttttcttcagtctggtgtatatctccataaagccatgcttgtaatccccaccagctctcgattacgggtgcaaagttcatgcctttttaaagcttgaggcataacatacacaaaattataaatacacaagcataagccttataatagttgttgtatgtgtgtatgtatatatgtgtgttatgtaataaatatttaactacatcaaagtgtagagcatttgtcagcccagaaagctacttcccaacaaagagagagagagagagagagagagagagagagagagagagagagagagagagagaactgatctgctttgtaaggacataaaacagtctttatctacattcaatatatgtagatgctggtagtcgattgtttataagttccctcacttgctactgtatccggaagacctaggttattttttatgttatgttatttatttattatacagggttctgcctatatgtatgtctgcacaccagaagaaggcaacagatctaattatagatgattatgagccaccatgtgtttctggggattgaacttgtgacctctggaagagcagccaatgttcttaacctctgagctatctctacaggccctgagacctaggtttttaatcctataccactgctttgttcttttctattactatgtaataattacagtgtgaataccaacatttatttatccatttgatttactattgccatttagattgtccccatgtttttgctgaagaaaattgctttatttttgttattatttttagtatacaaatacatatattttggtagaatatatccccaggaatggaaattctgattcagaggtaggtgtgcttagcattagcttttgccaaccaagtagtaaacaaagtgtttgttctcctggcctagagactggccatccttagtgccagtttggttgtttcatgttagggcttctagtagttaggtggttggtttactgtgtagttcccaactgagtttgttggttttctcttcacatgcgttaatgctctgctttcaatcatggatccaatatgaatttgggagaaatagaaacaaatgacagtactataagctatatagacttcaccgatacacagtgttccacctcagctagacaagatagagctcaaggtactagtattctccctgagatagtgtttgccagagatagacctcacagatacagtgttttactgcagacagactggagagacatcacagatacacgggggttttaccttaggcagaccagatagacttcatagatacacagtattcaatctcaggtagacaagtcctaatagattcaaagtattctacttcaggtagaccagatagtctagatagatgcactgtgttctaccttgaggactggtgagagggcttaacaggtaaagatgcttgctgccctagcctagaaacgtgagttctatccttagaacccatataaaagtggagaagaggactggctacataaggttgctcccccaacatctaccatacatgcataatggcatgcactcatcatgcactgattattattacatatgataaatttagtaagcgctcaatatacaaaatcatagaaataagttacttgtctatacactggcaatgatctatcttaaaagtaaggtaggaaaacaatatcatttgcagtggtacacaaaacaataatatagttaggaataaacttaaccaaggaaaggaaagagttatataccaaaaccaaaaaaattctcattaagaaaaattgaagacccaaatgtaaaggcatcttgcatctcatgttcatgaactagaagaattaatgttgtttaatttccatactgtcctaagaaatctacagatttggtgtataaacatactaacatgctctttacaggaatagataaaacccaattttatatatatatgaaaatccctatgaaaaactaaatcctgaagaaaaataagaaagctggaaacaatgcacctcttggttgcaaattatgttacaaagatacagtaatcaaagcagtacagtattaggcatatagaccagtgaaacagaatagagatctcaaaataaacccatacatctatggccacccatcttttgccaagaatacacaatgatgtattcatatccacatatggagaaatgagactgaagctttaccttatatcacacctacaaaaatcaactcaaagtggattaaggacttaaatgtaaaacctagaattggatctcaccgtcacacaggagaaaaacttcatggcacaatcagattggctgttgagttgagctccttcctgatcctattaaaagcattgctgtttgggggtgggggtggggctcgggagatgacccgatgggtgatgtgattgttgcacgggcatgaggacctcagtttgggttttcagctcccacataaagagctagaacaggaggtgtgcgcctgtaattgcagtgccagggaggcggagctaggggtggggggagggagaggcatgatctcccatttgaactcagagcttgcatattgggctagtctcgccagcctgtcctgggggggggggggtctcccgtttccacctcctgaggtctggggttacagccagcctgcctgacatttacgtgggtgctttacctgctgagccatttccacactcttcctttctttcttgatagaagctatcctaactaacgtgggtgagaggggattggattctgggcttgagttccttttctctaataatcagacctgctggacatctttccctgtgcttattggttatttgaagaacttcagagacgtctgctggagtcctgtggtcattttaaaagcagaagtccttgcttttgttgttgctgattcgtaggcattctttactgcatggaacttactctgtcagagctataactacagctatgtcctctcagtctgcaggcttttcaccctcttctgatttgaccattgacgtgtaggggtcactgatctcaatgctgtccagtttaatctttttgacttttttgctttgtgttatatttaaaatatcattactagttccaacatcacaaggcttttcctgtatgttttcttctaagggttttatagttttggctttgtgttgaggtcttgtttccaatttgagttgacttaggccgttttcagttggactggccctgtatgaggagttccgtggaacatttgagatggagcagataaataaaacatgttgcagagtggtcatgactgcatgccactgcaaggacagtaatgtccacctgccacacaggcatgaagagagagactgtaggcagtgcccttgttcactgtgggcatagtcaacaacagtgatctgcccttctagtatacttataggatgtgtgtgcttctatgcctgtgcgcccactcacatgcctgtgtgtatatgtatgcctgtgtatgtgtgtgtgtgtgtgtgtgtgtgtgtgtgtgtgtgtgtgtgtgtgtgatgttgtagtgtgttctttccttaattaaaaaattatctatctactgtgtgtatatgagtgagcacatgtgtaccatggacaatttgtgaaacttggttctctccttctgccgtgtagattccagaaattgacctcaggtgatctggcttggcaccaagtacccctacccactgagccatcttgccactggccctgttgtcccatgtcctatatatgtcccttcatggtagacagaagaaccctaactacttaggcagctttttgtaccaatgtcacttaaacaaaatgtggtcaaaagacagctggagacctactgggcgctgacaagcatacaggctgctgtagaatccagatctgttccaggcagtgatcctggcagagcacagtagccagaagatacgagtctgacccggtctcctgacaggttctagtcttccccagggtgtcctcagtagcacttcctggcccattgaagataagtaggtcggcttaagttcacaagtgcccactgagttctctcggtgtccagacatggctttggatgcttctagggaaggcagataaaaataaatgacaaggcaggagggcagcatgctaactaggtggataacaatgggcaacccagtggatgaattagccccaagcatctgggctctgctgggcccctgctgatatgagctgcgaccccaatgctggctcattttcagcatcactggagcaagacatcagcatggcagacacttttccaggtaaaataaaacacacagaagttcttaacaaggccagccctcatggcgggaagaaaggctgctgggagtggtatgctttgccctcagagttagagcttgagtcctgtctgcaaggctgtgtggcccgggccctgcagggtctccattgcagaaggcacctggtagccctgactcagctgtaggctcggctccttggcagctttgtgattttatacctcggtttcctaatatgtaagacaggcatgataaaggcgggtggtggcggagttgttgtaaggaacaaatgggttgatttatttaaatcccctcaggacagtcctgacatgagcgggaattttagggcccagtccagactcagaacctgagcatatgccatcgctgcctcttgtcactgtgccagtgccccagggtgacgtaagcaggacagcaagttctagctttctacctgctccataaaggctggggatcttgtttctgatttctgcatgtcaacaccagagacgtccatgtcaacctctctggtaataatagtgtcaccttggttcctgggtctaacaggaagacagttcccaaccagacacaactcacttccttctatacaaacagtatacaaacttaagtgacttaaagaacgagagctttgacctactggttgagaagcattctgagtttgaacccaggactgactcccacaatctttcctaggccccccacattcacagatgacatgcatgcccacatgtatatacacagatacacacacagtgttgcattagggagtgtgagggggcatcacccgagaaacctggaccaggcccccctagcacacctaggtgataagactccctctttcctggggtcagtgaccacagctctgtgacggcacatgtgagataccactgagcactcacagttgggtctgaggtgggatgcaggaactcatccggaacctaccccagggcagcatgaagcccccttccttgacactctgggtaccagattcccagatctcgacatcctgtgtccacattcaacctcttaagctctctttgcacatgcgcctgcctctaaaccacttcccttcttccagatccaactcaacggtgtcccatcatttaaggcctcgctgaagctcttcttcctccaggcagcctgtacggttcattgcctttgcaatagcagaatgtgaaggcaaagtaggaaggcaggagaagccgagaggctgggacccgcttatgatagagctaaacaccattggctcagactctgcaaaggggagctacagagaggtcctgaaaagagagacacaccctagcttggtgtagctaatcaccaaaggttctctcttccacagtgagcagtggggtggtggttttggagaggaacaactgggggaggggaggacataagtcttaagagaatgaggtggtacaaacaggttgcatgctaaatacaagtatagccatgaaacttaggatcatagaggaagagactggtagataacccactatggagaatttgcattggccagtaaggaaaactccttggctaataactttgtgcagataccctaagcctcactgaagatcaagatataagatgacactctggtggatataagacagccagtttctatgcctggcgcctgtgaatagactgcctttcatggcaagagggactttgtggctagcctgagaagggtctattatgggttatccaggcagaagcaagagaaaggaaagacaggcattactgtgaagtgattccattggagccaatgtggctttgaagacataaggagccacaagccaaggggtgcaggcagcctctgggagccggaaaagactcaagagattagtgacccaccccagtggggttagtgcctagctgctcaaagggaccagtaactgctgcttcgccaaagagttgcgatttgctgctggagcagattctggttcctgcccattcattgtcccttaggcagttcttcatccatcagatgggaagtcatcctgcaccatgttcctccctgagaaaactggcaagcggaagccaagtgcctgtcctgttagccatgacctagatgttggccggggctagggcaaaggaacctgggaaagaacaggctgtagctaggtggctgtagatcaatcaaagttggagttttctatactaagaagggcaaatggcttctgggagggatccagctgtgttttcattcccaaccagggaccacccttgcttggccttgacctcattctgatccaacttccttctgtggcactttctgactgcctcacccagaagctccaggccaatatcctcatacctgtcctgcctcacttttactttccttcataagtgaggactccacacacacacacacacacacacacacacacacgcgcgcgcgcgcgcgcgactgtgaacaactctggaggtggctgataatctggtgtatcacgaagtgagaatatttgctgttcatatcctgtctggcctgtggtcttgattcttggatccctagctattgaaagtggcaaggttcactttcttggcaatttgaaataactatgttttattgacagtaaatcttgtgaccacactttggtatactcggtgtgcatgtttgtgtgtgtgtgtgtgtgtgtgtgtgtgtgtgtgtgtgtgtgtgtgtaagttcattattagcaaagaaccttgttggaacctccaacttaacctctggggttaggttggtatagcagctccctgggcatgaagctcttgtcttctgtcacctcagttttatctcacttgggcaacagccctggcacctcagcctagagcctgaaatagattccagctggtgtcctgacagtgtgagtggcctatctggcctgatggagcccagttcctggctccccctgcttcaaaacattcactccagatcctgatcatgtggttatagcactagatatcaaaggagttttcccactaccttcaggatcccagccacctggccttgaacctgttgatgtcacatgattaaccctaagatcttggtggctctagttccagtgagctctgattgcttccttactggattgtttcaatagatgagcctgtggaagctttcagaataggagctgactagcctgatatgttagccaattagctgttggaaaccaaattctcctcatggttgtcagttggcttctgaggtcccatggcctcagtagtgaatgacatgaacattttctgtggctaatctctagagcacacttttcccctccgtagcttgaaaggaaaccctgaagcactggaccactgttgtggtgatttatacaatgtgcccactagttgtctaaaaagtggctttttctgtcacttgaatcatgctcagaactaagtcaagtgggaaagagatgtgcttttcatgtctctgggtcacagggtcagcttaggttctcctaaagagtagccaataccttgctcacaccacatctgaatttgacatgatcgaaggctgagaaattcccaagtcatgagtttttgatgtccagcatccaccttggcaacaacacctgtcctacaatttggtaaagcaagatgcagagggtgccagtcctaaactcagagggcctgtgtggccctggctggttggtcccatatgcctttaatttcagcccttgggaggcagaggcaagtggagctctgagtttgaggccagcctgatccacagagtgagttacaggacatggataaacacacacacacacacatacacacacacacacacacacacacacacacacacacatacacacatacacacactcacacacacacactcacacactcacacacacactcacacacacacatacacacacattcacacatacacactcacacacacacacacacacacacacacatgcttgcaaagctgaaggaactctctagaaaatctcccatttccttgggagtgattggatcagtctggtggtcacagccaggttcagtgtgagttaccatgggctatgtcccaacctttattgctttgcccagaaacacaagatagggatttgcatgagggtgaatatgagtgatatttctcaaggccatgcagatctggggccagagagtgtctttgttaacaatctatcctttggaaagctcatcccagcatcctcagacacttcttacctctcaccgatccagcaccatctgtatccccctcagcagcatctttatccatttcctaatggtgttcttctgcaggctacaggagcagttctgacgggacctgctactacccttattccagattcacagcagaggcttggcaagcccaggctccctgagactgggtcacagggcagggttaggggcccaggtctctagcccccagaaaccccataagacagtgtcagaagcattggctctgtggaggcatcggtgtagtatgagtgtggggagatggggtgcggcatcctgtttgaatgtctctggctagtttttaagaagtcttagccagctttaactgcactccgtttgcccagcctgtggacagcctcagtaaatccttttcctctgttgtgtgtattttttttccctcatagaagaccgtgatttctcctccgaggctgctattctccaatacagaattcaagggcagaagagggccgccccagcatccattgtggcatctctccggcccggactagggatgacaggcccatggacatggatgtctccgaccttcagctgttcatatagcacacaggggactcgtgggggccgcttgtcacccaaacccactcaatggcaatactgacatcttccaggctgttttcaagacaggcgttcaggcagaaaaatgccagtatgctttctgtctgcagagtagtgggctatgccacaccaatatgaacagcgtgggccctgggacctgctctgagtccacttgcagccactgacacttgaggggattaaaaaaaaaagcccagccccaaaaccatcgtggggttggcttccatggctcttgaccaatgtggccaaagctagacacctcgggacacttggattattcataaatgcgacctaccccaaactccctgagtagcatctgaagtcttgtgaaggtcatggatcctgaccaaagcatcaagggcaccaagaaggctgatggaagtccccggaagcggctgaccaaaggagaggccattcagacgagtgtttcttccagtgctccatacccaggcagcggcactactgctccctcagagagtgccacccaggagctcctagccacgcagcctttctcaggcccctctcaggagaaaacgggccagcagcagaagcctgcccggaggccttccatcgaggcctcggtccacatctctcagcttccgcagcaccctctgacaccagcattcatgtccccgggcaagccagagcatctcctcgaggggtccacgtggcagctggttgaccccatgagacctggaccctcgggctcctttgtggcccccgggctgcatccgcagagccagctcctcccatcccatgcttctatccttcctcctgaggagctgcctggcatccctaaggtctttgtgcctcgtccctcacaggtctccctgaaacctgcagaagaggcacacaagaaagagaggaaaccgcagaagccaggcaagtatatatgtcaatactgcagccgaccctgcgccaagcccagtgtgctccagaaacacattcgctcacacacaggtgagaggccctacccctgcggcccctgcggcttctccttcaagaccaagagtaacctctacaagcacaggaagtcccatgcccaccgtatcaaagctggcctggcctcgggctccagcagtgagatgtacccccctgggctggagatggagaggatccccggggaagagtttgaggaacccaccgagggagaaagcacagactctgaggaggaaacgggtgccgcatcaggtccctccacagatgttctccccaaacccaagcaccccctgctctcaagtagtttgtacagctccgggagccacggttccagccaggaacgctgctccctctcccagtcaagcactggcccatcactagaggaccccgccccatttgcagaagcctcatcggaacatcccctgagccataaaccggaagacacgcacaccatcaagcagaagctggcactccgcctgagtgagaggaagaagctgatcgaagagcagacattcctgagcccagggagcaaaggcagcacagagtccgggtacttctcacgctctgagagcgctgagcagcaggtcagcccccccaacaccaacgcaaagtcctacgcagagatcatcttcggcaagtgtggacggattgggcagcggacctccatgctggcatccacctctacccagcccctactgcctctatcctcggaagacaagcccagcttggtacctttgtctgtgcccaggacacaagtgatcgaacatatcaccaagctcatcaccatcaatgaagccgtggtggacaccagtgagatcgacagtgtgaagcccaggaggagctctctaaccaggcgcagcagcgtggagtccccgaagtccagcctctaccgggactcactatcgtcccatggggagaagactaagcaggagcaatcactgctgagcctccagcacccacccagctccacgcaccctgtgcctctcctgagaagtcactcaatgccttctgccgcctgcaccatcagcacccaccaccacaccttccgtggtagctactcctttgatgaccacgtcgctgaccccgaggtccccagccgcaacactcccgtgtttacctcccacccacggatgctaaagcgccagccagccattgaattacctttggggggtgagtacagttccgaggagcctggaccgagcagcaaggaccccacctccaagccctccgatgaaccagaacccaaggaaagcgaccttaccaaaaagaccaagaaggggttcaaaacaaaaggcgcgaactatgaatgtaccatctgcggtgctcggtacaaaaagagagataattacgaagctcataagaagtactactgctctgagctccagatcacaaaagcccactctgtaggtgctcatgaagtggaaaagactcaggctgagcctgagccttggtcccagatgatgcattataaactgggggccaccttggaactcactccgctgagaaaaagacggaaagaaaagagccttggagatgaggaagagccacctgcctttggcagcccaggcccttcagaaacagctcataaccgtcccctggggtccaccaagtcaccagcagaagcaagcaaatcagcgccctctctagagggacccacgagcttccagcccaggactcccaagccaggagctgggtcagaaccagggaaggagaggagaacaatgtccaaagaaatttccgtcatccagcacaccagctcctttgagaagtctgacccaccggagcagcccagtggcctggaggaagacaagcccccggcccagttctcatccccaccacctgccccgcacggacgctccgctcactccctgcagccaaggttggtccggcagcccaacattcaggttccagagatcctcgtgacagaagaaccggacaggcctgacacagagcctgagccgccccccaaggagcctgagaagacagaagaattccagtggccccagcgcagccagacactggcacaactcccagcggagaagctgccacccaagaaaaagagactccgcctggctgagatggcgcagtcctcgggggagtccagctttgagtcctccgtgcctctgtctcgaagcccaagccaggagagcagcatttctctgagtggctccagccgctcggcttcattcgacagggaagaccatggaaaagctgaggcccctggacccttctcagacacacgctccaaaaccttgggctcccacatgctgactgtccccagccaccacccacatgcccgagagatgagacggtcagcctcagagcagagccccaatgtgccccattcctcacacatgactgagacccgaagcaaatcctttgactacggcagcttgtcccctacaggaccatccttagcagtgcctgctgctccgccacccccagccgccccgccagaaagaagaaaatgctttctggtacgtcaggcctccctgaacagacctccagaagccgagctggaggctgtgcccaagggaaaacaagagagcagtgaggagcccgcagccagcaagccttccacaaaaagctctgtgccccagatctctgtgggcactacgcaaggtgggccttcagggggcaaaagccagatgcaggacaggcccccactgggatccagcccaccctacacagaagctctgcaagtgttccaacctctcggcacccagctgccccctccagcctctctcttctccttgcaacagctcttgcctcaggagcaagaacaatcctctgagttcttccccacacaagcaatggccggcctcctctcctccccatactccatgcccccgctcccaccttccttgttccaagccccaccacttcctctacagcctactgtgctacaccccagccagctccatctcccccagctcctgcctcacgctgcagatatccccttccagcagcccccttcctttctccccatgccatgccctgccccttcaaccctctccggatatttcctccctctgcaatcccagtttgcactgcagctccctggtgaaatagaaagccacttgcccccagtcaaaaccagcctgccccctctggccacaggacctcctggcccctccagcagcacagaatacagcagtgacatccagctgcctcctgtgactccccaagccacctccccagctcccacatcagccccaccactggcccttcctgcctgtccagatgccatggtgtcactggttgttcctgtccgaatccagacccatatgccatcctatggaagtgccatgtacaccactttgtctcagatcttggtcacacagtctccgggtagcccagcaagcacggcccttaccaagtacgaggaaccctcctccaaaagtatgactgtttgtgaggctgatgtatatgaggctgagcctgggccatcgagcataagcaaggaacaaaacagaggttaccagacaccatatctgagagtacctgaaaggaaaggcacttcactgtcttctgagggtatcctgagcctggaggggtgctcatccacagccagtggaagcaagcgcgtcctttccccagctggcagtcttgaacttaccatggaaacccagcagcagaaaagggtaaaggaggaagaagcttccaaggcagatgaaaaactggagcttgtgagtacctgtagtgtcgtgctgacaagtacagaggataggaagaagacagagaaaccccatgtgggtggccagggccggagcaggagggaggcagaaacactgtccagcttgtcttcagatgtatccgacccaaaagaactttctcccctctctcattccacattgtcccatgggacagccccaggctcagaagctttgaaggaatatgcccaaccatctagcaaagctcaccgaagaggtctgcctccaatgagtgtaaagaaagaagatccaaaggaacagactgacctccctcccctggcaccccctagttctctgcctctgtcagatacttcccctaaaccagccaaattgcaagaaggtacggactcaaagaaggtactgcagttccccagcctccacacaaccactaatgtcagttggtgctatttaaactacattaagccaaatcacatccagcatgcagataggaggtcctctgtttacgctggttggtgcataagtttgtacaaccccaaccttccaggggtttccactaaagctgctttgtccctcctgcgatctaagcagaaggtgagcaaagagacatataccatggccacagctccgcatcctgaggcaggaaggctggttccatccaactcccgaaagccccgcatgacagaggtaagttctgccttgttctagccaccaagtaatgcaaaagcttatgttgagcttttaaagccacattgtcttcatgctaagtttgtagaattaaagccagcttgaggtgagaggcaggtttttctctctgggagtcttgacctcataagaaaacatgttcactgagcttctctgcccttgtgtccctaacatagttgcagtaacgctatcagcaaaatgctgctacttttccagaagtttctactataaaattgaaaagttcagtttcaggaagatatagagtgattctctaaagaacaaagttggggaaattggtggggatgctttggacaattttagaactttattccagcattttcccatgtggttctccatcatcttattagtttcaatctgctttttaaattttttctgtatctgctgggggggggtctctactatcctttaaaattgtctcatttccacatttgacacaattcactcctaaaagaatactttcctgtaagatggtgcatagaactgggctgcagtaaacctctccacgtgtaggagacaatatcacaatttgagatgtctgtgctatagattagcagtagggtttcaatgcaactcatatttattcttccattgcctctgacctgggctacttaaggagctatgcaataaagtttcccatatcattttaacagatttgaaactcagaaattccaatttgcataaaaaagacaacacttttacacaggcaagaccagcctaaagcttcaggccaggacctgtgctggcctaatgtgacaaaatatcccaacaaaagtaacctaagggaaagaatttattttgacttataacttcagaagcatacaatacatagtggccaggaagccatggaagaggcagaagaggcatttagaagttggctggttgctgggcatggtggcgcacacctttaatcccagcactcgagaggcagaggcaggccagcctggtctacaaagtgagttccaggacagccagggctatacagagaaaccctgtctcgaaaaaccgaaaaaaaaagaaaaaaaaaataaagaagttggctggttgtattgtctccacattcaggaagcagagaatgaataaggagcagagcccagctataaatccttaaggtcatcactatagacactctcttgaacaatcttcccaaacagcatcagtttatatggggacttttcacattcaaaccatgcctggaatttttggagtgagcagtggtcttttggttgccaagccctgtgctgggccctggaccctaagcacttctcacctcgccttgtaaggcgacatcacctcatccattgtacagatgagggaacctgggctcagaggctgaaggaggtcaaagacttggggcaaacatttggcaattccagaatttgaattaagcagacgtagctggatgaaaaagagtatttcttttcttttctttttttcttttctttcttcttttcttttttctttcctttccttttgtttgtctccattctctctctctctctctttcattgttagttgaggaatgaaacttttgagagataattacaaatttaatgatgtccacatgtaactgttacaaactggtgctttgaccaaatcccacacagacactggaacccagactacttttgtagacctgagagcagacctgtgtctgcagcttcccagatgcttatacaatctgctttcatcatgaggtgaaagtcatatcagaagtgactgggctcagctggatattcttcacaaactgctttccaaatttattctctgatgtctttgtcagtccacatcagacatctctgagcaggatttccacttctggtgttactgccataaactgtggctgctgccaagatgctggcatagttacactggaaacacacctgctgtgtgccagatactgtgctaaactttactcttgttttcataacaccctgggaaactagggtacagtaggtaaatagatcaaagttcagagaggctaagtaacttacacaaggccacacagtaaatggcaaagatcagattcagaactagagctcactccaaaatcctttgaaacaggtctgaactgtcctattccctgatgagtggtatcagaagtatgtaagacaagagaagtgttggtttctcatctctaaatttaacagtcatttttttcatcctgctgctttcataaaatgagctgaaacctacagacatttccttagagtttaaatgttcctacccaaagtgtacaaatatcacacattaatataactgcatggtctctaagctgaggcttttctacaacccccattcccttccttacatgtctccagtaatgggaggctcacccccctgccagccccagcaccacccaagccatacttggctacagtttaagctcttctgcacactctactgacagttgtcactttgtagctggtgtcttcccttagccattacataaatgtcatttatctaagcactaggaaacatggcttagctgtcatctttagtatggtccacaacacattatgtttggtcatctgcatttaaatcctgaagagacccatgcttgcataaccatccatcttgcacaatccatcttgcagtcatttcttttcttatactttttcttccattttctctcactctaatagccatagccctgcaatgggagcaaggactgaactgcccaggtttgaggcccactatttcacatattcagctgtgtgaccatgggccattcacctaacttccctgtaccttggtttcttcatctgaaaatgaggagtgatgctaacttagctcaaggctgtgagggtgggcaacagtgttgaccagtgaagctatatatatgccctagctaacatgacccacattactattcaatgctaccacggatcctaggcccccaccccactcaatttaggcactgtttcctggaattgtgttgccacccaatcctacctcctctggcctccccagaatggcatcatatagcaatggagactctgtgtgcctgcctgtgttggaccccttggcaactctgtggattgcaggccatggtggaaatgtggagtgtgccctagaaatctaactgcttggcttccaccagcacagctgtctagacctgaacttagtttccatttcccctcccattgggaagggacctcagtgacctctatggggtcactgagtcacagaaatcagtttctgaatggatctttaggatgatctaagccaggtctgaagaggtggctctttagtcaagagtggttactcttcttacagagtttagatccccagcacccacgtgaagtggctcacaatcacctgtgagtccagctccaggggatctgatgtcctgttcttttctgtgcacatgtgtacatacacacacacacacacacacacacacacacacacacacacacacacaccacaattaaaaataaaaaaaaaaatttaatggcctaaggctttcttagtttcaaaccccagaaggtgtagtagtctatctaagggtatcccagcctccagtgatctatttggcattggaactcacttttcctggttcccaaggtgccccttatctcagctctatgggtgcgagcatcctatgtaaagatgtacatcaccccccacccccgcctcagatttagagaatatattctcaggaccctggaaaacactggaaattcacaatcagggttcacccttcccacagatccagttctcactgcagcccactgttctacagagagtggataccccagtggcctttggtgttggctcaggagggctagtgcaggaagcaggagacctgtgcattgctggagccacgccctttacctagtagattgctttggctttccaatctgaccatgagaacaccacggttatacatgtatacagagccaaggcttcgcctatttcttcagcattatttgtcttttttgatccctattttaagtactggagtgaccaaggtgaatgagacatatccccaaagaccccatagcatagaacacaaagacctacctgtgcgtctcaggggaaaatgatcttgagaggggttcaaaacacagcttagaggagactttgactcttgtggccagtccttgagtctgtagagggtgttgagtgaaaaacagaggccgtgtgggtgcacatgcctttgcccctgacccagtatgcaaggctaaccaatcttggttctgtctttcccacggagttcaggtgcacctcccgtcgctggtttccccagagagccagaaagacccagctagagtggaaaaggaagaaaagcaagggaaggcggaggaaggtactcccacttccaagagaggcgagccggcgagggtcaagatcttcgaaggagggtaagtttcatgcttttatttgcagtctgcttcctgtgtggagaccttctaccacctgcgcgcagaagtggccagtgactcctggctgtgggctgcccaaaggtacctatagtcctcacaggccctccctatactttgggactccaaggccatctgttttgcaaatgctaccaggaatccttggtgatgatctgaaggagccaaggtctttctccagccctgtgtccacagatcttgtccaggttctcacccagcattgaagtgatgtagagtcctcagctccacatcagtctacactattgtttcctttagagtttattgcctctgtcctgccaggccaccctggtcacatctcacttcccgtggtgctgaagagtgattgaatgccctctacactgtctctgccttgcccactggcaggtccactctaggacacaccccatgtaccccaggctctagaggggcacctggattcagatgtactttgtggaaggtctttgtgcactttttgttctgtgtggccacgtgtttgtgagcaggtcccatggtgtctgtcttggggtcctatgtctgtgtccctgttgtgatcagggtggtaccgattctctacagttctgatgaaagcaatctccataagcctctgataacatgggacatcagtggggactcttgctctccagcatctgtaagtgactacctcatgggaacacacagtgacaactgtgggagtctctggaaagttggcattttggagtggctagaagggctcgtggggacaggcagtggttttgacaggtacagggtcagaggacggtgaatgtccctgaagcacatccacaatttaaaaaaaaaaaaaaaaaaaaaaaaaagacctctttgacaaaaacaggaccataggttctgcttcagagcctgaccctctttccacttgggtacagtggcttcccatgcctacatttggctagagcgccctcatgtggctatgtgccctcatgccacttggttccaagctccaggcttggcagctttgccccttcatcctcctcctgggtgaaggggatagcaacaggcttgtaccaacgccctaagccccataaggccaaggaaggatatggttcccacagacctatcacatggacaccgaccagcccctctcctgtgcccagatctttgtccccatctgaagcacctcactctgctcttggctgtggggagtgtcatccttgtgcttctagctggtcacatggtatcgataatcaggttctttccatcctcagctcagctgcccctcaccctgactctaagatctactgtgcttcctaccctcgcttctggtaaacctcttctttcatgggctcggtgctacccactaggaatatttgctgatatgaaaagggggagcattttgtgttgatacctatctgaggacacctccacagcgtctcatgaatgggaccaggactcaccaagtgcttgtctcatctgtcaccaagggtgcacctattccaggatcctgaacacatgcttaaggccagtctacactaaccgtttcttcttagcctcattgccttcttctttctctctctttaacacttacaatatcttgtttcacagcagtacatactggtaaagggtctgtaatgaggcctgctcagagtccagcaagagcccagagagggaggcagaactgtctgctgtagagagaatatcttgtgtaatgtatggatgcatcacctgtcaatgaaaaagcccaagacttaggcaggaaatagaaggtcggatatctgggaggcgggagagattctgggatagagacaggtgtgggagatcggcctgggaagatatgaggagacagacatggtacctgagcacagtaaccagctgcatgatagaatgtagggtaaaataaatgaacaggtatcttaggatatgaattctagtcagagtagagcctagctatgtggccaaggtatttgtaaatatattttgagtctgagtcttattttgggagcatggggctgggaggaaggattggtacgtaacttctatagtttgccagctgctaatgcaccctccttggccctggagtctcgtccactgactacagagttgtgtactctaagaccgtgggagtaaggatggacaatcccagtcatctctgatcctgagagaacttaaaacattcagtcagtcgcgctggtgggactctggtctgcttcgtatgcatctgctagtgggtaatttctccatggcatctgtgcaggtacaaacagggcctgttcacatgttaatctaataagccaagtatagaaagatgggtgttttgtgtgtctagcttcctcaagtctttggatcaccagccacattccttgactctcagtctagcagttgaccaattagtcaatccatcatggaggatagacttaatctgtgccttgtaggagctttaggctagacgttatagtgacctagttagtatcaaactgttattcagtacttaagctgcttgtggaccaaagcaaggtagcaatacaaaaccctgttctgaggtagggaccatcggggccgagatacccacagcacccacagggggcttcccagagctgtaggaccaggctgggtggtgtggacagggtggggtgacagacagctggagggccagtctgggtgaggtggacagggtggtttgacagctggtatataaagtaggctggtcagagctctccaggtgaccactgagactcttggattcttgccaaggttgcctgtcttgctgacatcatcctactctttggcttcagacttctcattactcttgctgcaatgtctgggatcagagctgggccctcactctgagctccagaccttttctcggacacctatggcatctttgcctaggacacttacaaactcggtacagctaagcaaggcccgcacttcccaatcatagtcttagttacttttctactgctgtgaagagacagtgactaaggcaatttataaaagaaagcatttaattggagatttgtttacagtttcggagcgtgagtccatgactatcatggcagggagcatggcagcaggcaggcaggcatggtgctggagcagtagccgagagctcacatcttatttagaggcagtaggcagagagagagagagagagagagagagagaacattatgtctgcagtgagctccccaatgacaaaccttcaaaaaggccacacctcttaattcttcctaaacgcccccccccccgccactaggaaccaagcattcaaagatggggtcattctcattcaaaccaccacacatggtatctcctccaacctttgaacttccgatgatgaagccttcacactctaacctcaacatcacctcagatgccttcttctggattccatacggtccctagattctggtgtctgtatgtgaagtagtcaagggctcagaatggcttctctctccctttatcccctgcatcctaccctccagtgttagggccactgggcatctttccacatggttgttcctgcagagcccactgtggctcttacctgcagtgttaactcagcctctctctaacttgcccaggttccttcactttctgctgcctatggattctaccctttgtctgatccacctgatcttcagaaatgagtgctagccctgcctggtgaacctctgaggtccctgccctggcacaccatagatggtttccataataccatatcaagtctcttcttgacttggtcctggagcaatgcttttgtccacagtgttggcccctgtggactaccctaatgtcccctctccgtgtcccctgccacttttacacctgaacaaaacctgagttttccaggcagtgtctgggagtacctaggagcaccgtgcctgctggcttacacccagctctctgaatttgccttactgttgaggaagggctcattccgtgaagcagtgtttgtgcacatacggttatattgttccttgagtggaacgactacattgttctaactcaagagactttgcccaagggaagctgggaactcagccttgtggctggcatagaggaagctcctggggtggataggaagtacctggctgacggcagtggctgcacataccctatccaggttcgatgtgtgtgctgaggtctgaggaagtgacggaagtgaagctagtgaagtttagggagcccagctccgtttaggggaggccctcagagagctggccgtgagcaggaagagccagcctcagcttggaactggaactcagggaagaaataccaaagtgtcactgtgagaaagctccctccccactccctaaggatagaagagagtggctcacagactcaccccttggccaataggtctgtgtcagaaggacccagatgctatgctgaggaaaccatttgttcccaggaagagccctggccacatccctctcagcctcacttcatccaaataagtatatccaggtttgtttccactccaaatcactccttggatagctaggttttaatagttgtttaaatacacacacacacacacacacacacacacacacacacacacgctgatctgtaagttccagggatccaatgcctatcttctgacctctccaggcatcaggcatgcatatgggacacatatttacatgaacttatatgtatacacaaaataaaaataatcaagctggggctggagagatagctcagcagtttagagcacctactgctcttacagaagacctgggttcaattctcagcactcacatggtggctcacaatcttctaccatcaaaatctccagttccaggatatctgataccctcttctgggctctatgggcaccaggcatacagatggtacacatgtaggcaaaacactcatacacataaaataaaaattctaaaaataaatgtaaagggaaaaaaaaaaaaaccctcggagcggttgcctctgactcaggttctctccccttcccttcctacccagttccactccaggtggcctggggactctcctaccttggcagctcttttgtccttgtaaaggtcaacagtgacctgcactttgcagaggtcaagggtcactcacttccagtcttttctgactttcagcagtggacaccgctgacccttgtcttctctttgctgtggactggggagtgaggtagctggcctttcacagaggacaggccagctttgtcctatttttcttgatgtcttcaaatctgatcattctgtctccactggggaatgtgacatgaattttagaggaacccagtggttaccaaggcaatgaagaccatgggatactgagagtccaaacagcctttgtgttaggccattgctaccttagctattatgagataatgttaagtttgcagctgggaagcaatggcaagggcagtggggtggggaccctgggactcctgacaagagaacaggaaggcagaaatgaagcgttgccacctcgagtgtggccccaatcactgctgggcacatgcagaacagagataaacacaagacccaagttgagagagtggatggccgaccctggaggcactgtggagcatgtgaatctgagagccagtttctccgggagacatggtcttgcgcgcgctcaactggccaggaagaacgacgctgctacaggatccttctgcacacatttattcagtcctgtttcttctttctccatatatctcccttgtttatatatctcccttgtttttatatctcccctgtttttatatctcccttgtttttatatctcccttgtttttatatctcccttgtttatatctcccttgtttatatctcccttgtttatatctcccctgtttatatctcccttgtttttatatctcccctgtttttatatctcccttgtttttatatctcccttgtttttatatctccctccaaccctgggcctctcactcttttatactctctctcatccacacaccgcaggccacgccccctcgccagtcacgaggcttcagctaatcagggcagcaggggcaaatctccaccaaattggattcacctgtatcctggtacacctgcgcagcactcaagatgtttgtgtcttatatgaggaagtcaggtgcaagtcatatgacttagctacagtccctggcgcctttgggactgccgccacacccgctcctaacatctcccccttttttcttttctggcaaaaagaatgtctgtagatagccctccgcagccatgccccttacccgtccttgggagacaaacagcaatggtttgatccctgtcttaggttggtgacatgcccagggagacttatcactgactacctatcatgccaagccacacttggggagattgtgttttgcttgcggcaggtgcatcaaaaggccaggatgttgattaatctatggccagatcttaattgctgcaagcaagcctcatgggtgaaggtagaggtctgatccccagtgtgcaagcataggggccctacacaaaaccatcccttgggctcatcacccagagaggtcttggccagctcccgtgtcgtttttcctgtgggaagggaactaggacactgaaccttcatttaatcagacatgccttccacaggatgccaacagcaagctatcctctgtgcagtgcttagcctcgcaccccacggcataacgcagcataatttcttttagagtggcaaaccaaatctgaggagattgtcccgcctccactgcagcaaaagcctatgctaccatggcgaaagtgcgggccgcacactctgcacctaacacatgtgccaaacacaaaacacacacacactataacaagcatacatcccagggctctcatccccgctcatcttccctgaagcaagggatagatggccagcggggctatctctttaaggggaattcagggatcaaaaagcgtggaaaaatttgaatgtcatgtcgagctggtatcgacttctggaacaccgaaaggatctcccatctcggctccatcctttgtgcttgtgggaatatccaccacatccacaggggcaactggatcaggagcctcattcttgcagcgtctcaccaatctctccggcacccaaagaggttccgtctggtcctgtggaaacacacaaacagaccctctcgcccacgtcaacacctgatcctgtcgatcccaggggggatggacacaatacctcgtggtgatgagaccataacctcaatcacctgtgtgtccatctggggagtcaatacgagagtcaagttttcactaacttcccctctgttaggcaatgatttccacacccttatagcaatctgattcacctgcccaaacacctgcactggatatcctgactgttgttgtgcaaatctaccttgatcaagcagcatatctctatcccatgcaaattcagcttgatcagtgaaaataggacatcccagcaaggagaatctatcctctttccagacctccggacagaaggtctgcccatagatggctgacgaggaggcatagggagggggagcaaaagctaattcgccttcctcctctgcctcaactcttttattttgtcctttctgttcacctgataacactgtgtctcctttctttttcctttttctttttaagcccttttcctcttctgacatactttcttgttgctctgtaaggattttctgacctgtcttgactgcctctacacacagtttcaaacagtaacagagtccatatatcagaacaaacaagaccaaaactatcagacctacccacaaagggtcaatgggagaaaaaagcataactactcagcgaggatctattgatcactacactgaggttatcatagttccttaacttgtccccaaacagggaacctaacttgtcccaaagctgggaaccttttgttaccttgtgcctgcttcctggcaactttatgctcgcctctattttatccgaggtccttcccaaactcctgggttactttgtgcctacttcctggcaactttatgctcacctctattttatccgaggtccttcccaaactcctggggtcgcaagtttcactcaccgtgaacttaccctgccggcaaccactgactgctgaaagttctgaactcggtgggggagtcggttccccgtacgggccaccaattgtcgcgcccgctctcgaccagcaagaacgatgcgaccaccagtccttctaacagcagtttattcagtcttcatctctcttctttctcttcatcagtaccgttccccagctgaagagttctgaatccacgccggatccttctcaacagtctgtttcacgggaacctttattaaccccttcttccccgttatgcagttctgaatcctccctgtagcagggggtcttcgcttgtgcctgaagatgtttcttttcccgggtttcggcaccacttgttgcgcgcgctcaactggccaggaagaacgacgctgctacaggatccttctgcacacatttattcagtcctgtttcttctttctccatatatctcccttgtttatatatctcccttgtttttatatctcccctgtttatatctcccttgtttttatatctcccttgtttttatatctcccttgtttatatctcccttgtttatatctcccttgtttatatctcccctgtttatatctcccttgtttttatatctcccctgtttttatatctcccttgtttttatatctcccttgtttttatatctccctccaaccctgggcctctcactcttttatactctctctcatccacacaccgcaggccacgccccctcgccagtcacgaggcttcagctaatcagggcagcaggggcaaatctccaccaaattggattcacctgtatcctggtacacctgcgcagcactcaagatgtttgtgtcttatatgaggaagtcaggtgcaagtcatatgacttagctacagtccctggcgcctttgggactgccgccacacccgctcctaacaacatgggcacttggttcttgagctgggcaggcctgagctggaaatacacacatggaacttgtcagtgtgcagctgcactttgcggctctgactagatgggtcacctggggagaaggaaaagagagaaagggaaaggacagctagaacgggggctgggttctgcattggagggagagtcaaggatgctgagaggcaggatacccagagccaagtggagtccaagaagccaagaactgagagctcagctaggcatcaccctgcctggaggcccagggaggtggggatgggggactgtctgctgcacagccctgtggggagtgtagtggctgtgatgggagctgtttcccaggcaatggatttcctgtggtccaggctgagatgaggaatggaggcagggtattaaagccctgccctaaaaggatgaataggggagagaccaccaagatggaggaggaatggaagccgaaggggctgggggaatggaggggggaatgagcaggaccttgtttatttgaacccgtgtgtgtgtgtgtgtgtgtgtgtgtgtgtgtgcgtgtgtgtgtttgtgtgcgtgtgtgtgtgtgtgtgtggctgtgtgtgtgtacatgtatgtgtatgtgtgtggctgtgtgtgtgtgtgtggctgtgtgtgtgtgtgtgttggggagaggggagagtgaagaaacagctcaaggaaggataggagaagatatttctctgaggatgacaggcagaggggaggatggtcctctgtcctttcttccctgatttaacttaggttggttctacactgtccctcctggggacagccattatcttgggttggtcaagccttcttcatccactcatttcttgacaactcccagaattgtattgccagttttctctcttattctgtgaataaaatcataggattggtatgctgataaaaaaaaagggggggtgggcgagagggagggagggaggaaggaacaggagagtaaagttctcccaccatgatgttcatgttcttcagcacttcactgggcttggaaccgcctaggatatacacttctgggtgtgttggtgagggtatcccaggggtttttaactaaggagggaagatcccccataaacatggggtggtaccaacccatagaccaggagctctgactgggaaggagtgggggcaggggtgggggataccagtgttcatttctctctgctctgactgcacaggcatgagcaacccctctgtggtggactgtttcccttctctttcctctttacattgcttcttgtcaggtacttgctcatgggaacagcaaaaatcactaatatatccctcatctttagtgaatgacagccagtgggctgcttctcaaaaacaataattagccatgccacttccttccaaagaactctttgatgactgccatggcttcacctctaccctaggtctgtgtggagacacattctaacctaccaaggtgcagaggggtgcatgggagagccccactgcttacgggctttggaagcagtcagagtccggtgtggacaaacctatcaaagggaggggaaactcagcttgttctgtaactgcgtaagccacagacaacaggaacacatcaaccaggaaaatgtggctctggagacagatggaaggtctggcaagatgggtacctgaatcttcttagctctgacacccttacctttcctatctttgggcctcttcagaaacaagagcaggaactctcggcctgtggagctggagactcatggggtggtattctttctgcaagagtcactttcccagactgtaattgaaagaggagggataagtcttggacttggagtgtggggacctgcctcacacagtgagtttgtactctgctgttgttggctctgtgggcctcagcaatgctgggctctgtgtgagcctgtgtttctcattgtacagtgacgatggcccggagggttggatgagctgtgtgctagtcctgatggggcatatggggcctctcctgttgccaatgagctgcctgagctgtgagaatcacagagctccatgctagagagaaggctcgaagggagcctgcaggagaagacatatgaaccccagcctccctgtggaagagctaattctctgaaggtgcaagaaccacacaagcccttcaatagcgtgctccttcctgaccaagagcctctggagggtgccacaccctgaaatgaggtagcttgaaaaaggagcaccaagaatggggtctagtttgcttgaaaacgcacaactggggagtcaaagagatatcaagcctcttggtgatgggatgacagaccccctaaatcctcagaaaactcacatctccctagcctctggatctacctactgctatgtcttccatgctgtgtgcacccagggctcacagagaaaagtctggttgttcatccctacttacctgcagagtgttgttcttgattgaaagcccctgagccccatggccaactgcccctctgccgggtctggcccctgagccccgtctgcagtgataaatctatcttttcattctgtggctttgtagataccttgaggccaagatcagagtctggtggcctttccccagccccaggctcaggccaggactgttggcgtaccaccgaaagctaatgtaggcgtagagagtagaatcctctgctgaccggtaggctctgtacctgtgtagaagtcccagcccagcaggtgtgggactggatggcacattaaacaccccccacctggcaaagcatcaatacctgttgtcattcttcaggatcctgatcagagaggaacctgaggtgtatccagagctgaggcaaacaccctgctggcctcacagctcagccgccccctccccaaggcccatcatttaaagcttcatcaaggtctgtgttggcaactgagtatttctaacagacacacagcccagcaggcagtgccacctggcacctgctcctccccgacagacatcattccttttttttttgagcttccctggggttaaccagttcactgtggctgcatctccccaagcatgctgaccgctgagcactggccctgaacttcacaggcaaaggcttctctcagttcccgagatacccagtgtgaacattcccggtcatatcttctcgctcggcgtgattgtacccacgttgttaccagagttgtcaaaagatcataatacagtcaggaagttgaaaagcctttctacatccaaagttggaggagaagcaagagttttacagttaaacctgaacggtgtgtggagccatcaacaggacaagtacaaagtaggctttgtagcatctctgcctcagagggtaacctagaggtcacggcatccatccccttattcaagataatggcatagctcagtatcgagaaaagtcatgaacttgaaaggttagatgtgcctacaagtacttaaccactctaggttgggtctctgtctccttgagttatttgacttatacagtttcattttgtttgtttttagggcataataacacaggctttaagatcctgactgtgtaggcaagtgacctgggttcaagttctgaatccattaactgacagtgtgaacttgggcaggtactcggtgctctataactgtaccctcagtgagagcaggatgggtggggcccatagctcatccactgtcatgtgatctgaatgaggtaacatgtgagcttttcaaaatagcagttggcacccagtaaaagctatatgagttcactgatatttttagttgttgtttttcccccttctggatttgtggtttttctcaggaaacctgcaaaatacagcaatttcatgccacctttagctggatggcagcattctctgacccttcagagaggctgtgtgccctgccttccatttcttatagtcctccatacacacatcccccataggtaccccctctacctcttcagcatttgagcacagcccaccctccatttggtcttaggaacaaatgtaggctatgtaagaaaatgcacatccacttgacaatgctttgatggtctggacaagcttatctgcctgcagccgttaggctcatagtcacaattcctccctacagggctacctggcttgtgcaatgcggagcatgggtttgtggtaggaagctcaatgccttacagtggcttatgatacctgcatctttctcatatgcagagcctaaggtcacctcatcctctcagtcatctcacccccactgtacccctcttctggaacctgcagaaggatagtcacctcctctggtgtaatctgtgccaaacacctgtcaacttagcaaaagtttcaggtcttattaacaattccagagagtctagagctacaaaccaaggggtcaaacgcactgactgtccagacaagaagttcagtgtcatcagccgaatgcaggatgggaactcaaatcagtctaagattcagtgtgtcatatgccatagcaccaaagtcagagctggctccctgtcagacatctccattcacagctgcctaggagctctgagcatgatgctagcctcattgccactttgactagaggactgaagtcctgactagggctggcctgcctgagaggctttctttgctttggagtctccaggctcagagctacagtggaattcaaaaatagttgcccaaggcatgcttggcagctgtgtgtataaacacatgcaagcgcgctcgggcacacacacacacacacacacacacacacacacaccacccaaacccagaccaaaagacaaagagctacttcctatccccacaggacgtgggagctccagaactggggctgctggggctgctggggctgctggggctgctggggctgctggggctgctggggctgctctgctgaacccctactgcctggctctaaatctcagtcagggtacctggtcttaagattccctgcagctaatacattccaaattcctagagttgtctttttctttaatggaaacaccagactagctgacactctggctagtagggactgcaggggacaggtggacagcagggttttgagaagatacatgggtccccggagtcatgggtcatctacaccaagcctgacaacacagggaagcctgtgtgtcaggcctgtgagagaaagcatccagcagtgaagaggtggccagctccaagcaaggctacccttgcatctctgctttccggccctgactctctgcagctgccaacacctggatgtctcatttcaggctacagtttcagggaaggctgagtggacaacaattctgttcttccctgtctgcagcacagtagatcccaggtttgggttttactgctgtggacagacaccatgaccaaagcaactcttataaaggacaacatttaattggggctgacttacagatttagaggttcagtccattatcatcaaggtcagaacatggcagccctcaggcaggcatggtgtaggaagagctgaaagttcaatatcttgttctgaaggcaaacaggagaagactggcttccaggcagctagaatgagggtcttaaagtccacactcactgtgacacacttcctccaacaaagccatacttcctgatagtgccactccctgggtcaagcatattcaaaccaccacacgaggtcactgggaaactacattgagcaccaagagtgggcagcagtctgcacggcagccaggtgctcagaagatcagcactgggctgtcttgacatgtcagttaagctctttgggccttggcttccctttctgtacagaggcaaaaaggactgggggttggacagaaaggtggataatgtttagtctataaagtgctttgcatccccaaagattgaagatggactggtcctatggaggggcgacggtagcaagttctagtaaaatccagagatgagactcaagaccttctggccgccactctgtgcttacattcattctcattagaaagttatgttacatgcctataacatagtcagttaagactggaagtttgaggcttgcttgggctatatagtaagtctacataaggcagaaaacagaaagagaaactgtttgttgagaagcaccagccagagcaggtacagggggacagggtatctgggtttagagaaacaaaattgaatgaaacaaaagtgtgtcgtgttgaagctcattactttgtatgctaacttagaatttaattttaaaaactggaaggagcttctcttctgggctggagagatggctcagaagttaagagcactgtctgctctttcagaggtcctgagttcaattcccagcaactacatgctggctcacaaccatctgtaatgagatctggtgccctcttctggcctgcaggcatacatgcaggtagaatgctgtatacataataaataaataaataaataaataaataaatcttttttaaaatctggaaggaaagaaggaaggaggaaggaagggaggaagggcatgttcattcatgctgtgcatattggaggcaccctcagcattaggtgaaacttgtgtgtaagggcacatggggtgggcaaatcagtgcagagcctgatgccagcgtacttgaataaaagccctggctactgttctgacctgtgagcatttagtgagctcttgatgggcaccaggtacaatgctagactctggggaggctccagtgagcatggttgactggtaggaggggcctgatttaaacaaggtgggtgctggcctcaggcagaggaaggactagccctcactgacagaaaggtgttccataaagttacggtctcagccttcaaagagttgaagcaagtcatagggttgagccctgtgttcaactggagctgtctcttcaaaatccctgagccttcagtggccatcttccggccctccatgacctgtgactctgctgccctgcccctttctaagccatctctgctgggctttcaaagctcagccctgtctttggtccttgatgctctgcccttgctgtgtgtggcaggtcaaacgggcattttttttccttcacacctctcccctggatctgccacagcatccctgagcagccttccattctcttgcccagccaccctactcttcacaaacctataaaattctgcatccataggtccccgctgtgtgctagatgtttctgcgtatctttcttatctatgtcttacacacagttgttaaaatgagtgccctcattgcctcattcccagcctgtgaatggtctcgagaacaaggccagtggaaacttaagatgtctgtttctccctcatcctgacccctcctctatacagacagctgccgaggatgtagagttactctcagaatacttcgtgtttcctgccctagtcttccccaatctaaaccgttcccaagaggcaagtggatagttgcctcttgttgagattttgtttatctgcaatgcaatcttccatcaggtctggagtctttaaactgcccaatgaccgatcgtatggtccacatgacctgtgtggtctcctttcttctccttgccaacttcccataccttttagcacacctcttcctttgtccttgctgaaaatcctcctcctgctggccaccctcccgaccctgcctagccacgtgctggccagtagatggcgcccagcttctatagtacatgaccaggtggcataggatgccaacctctctgcaaaaaccctctctgtccttactgtgatgtggaggaagaagtgaggagatcagcgagatggactgccttagacccacttccggttgccatgataaagtccatgtaggtggaggccagaacagctgagggactgtgtgaggagcagcagtgtagcacggaagagtggtcagggagtgagtctcatggacccatcaaacagaacctcccgcagccaactggaggttagtggcaggtgacagagagcctatagcataaaccaaccttattactgagaaagagtgccggcctcaacttgaagactgcaccccaagggcacaaggaaaacgtgaggatgaaggcaaacttcttcctgtgtttgtacatagggtattctgggagtgcaccccccattgtgtgcaggtctttcttttgaacacaagatgtagattagatagatagatagatagatagatagatagatagatagatagatagataggcaggcttggagtgtaactgtagggtgagagtgtgatagtggaggtgtgtgcttgaagaatgtgtgattgtaggtatgagagtgtgaggctgacagggtgggcagtgtgtgactgttggtgtgagggtgtgactgagagcaagcagtttgtgactgtgtgtgaatgtgagggtggctatgggtgtttggggtgtatggttgttggtgtgagggtgtgaattgtgatctgtggtaagaggtgtatgatgctgactgtaacggcatgaaggtgactatgaatgtttggggtgtagggttggcggatgttagagtgactatggatgtttggggtgtagggttggcagatgttagggtgactatgggtgttggggtgtgtacgactgtgggcacgaggggtgtatgattgcttgtgtgagttgtgagtgtataagtctgggttgtgaggagtgtgtacttgtgggtgtgtaggcatgaggcatgagataaaccccctactgcgacctggagctcctatctgagagcccctcttcgagcccatcctggtcacacctctcagtctgagcagactcagtgctgttgtctctctgccatcgacccacctgcccctccagtgagcacagacaacaagcagtctttgctgaggcaatggggagacacatccccatctgtcttgtggtggtccatggcttctgaggtagacagctaccagaactgcttctcctgctgttcttaacgcctccagtgtgggataccaaagagagctcagtgcccctggtgcgttctgaacccaggaaggcaatggtggcccctgttcctccctcttacacgtgtccgggtggcttcctggtcggccaccttcttttgttgacccttgggggagatgactacatcaagactttgtggacccaccagccgttaaataatgacccagagactgatttatttgtattatagcttaggcctttagcttggactacctcacagctagttcatctaacttaatcctataatcctagcccaccccaccctagttctttgcctcaccctcagtcccggtacactaccgaccccctccgtgccctgctgtcaaatccccactactcatttcatctcccagacaccctttctcggtgtgaaagttctgcctagctattggccacctgatctttattaagccaatcaacaggtgagggagggagagtgtttgcagaattctgaggcaggtggatgatctgtaagaataacagtacccaaatccatccagtactcacctctgagggcacagcaaccaacaactgaatatacagagacatccttcacacagtgcacccctacagacaacatggcgtgggaaggtgcgggttctggtccagccctttctgactgggtgctcttcggtgagtgtctcaccctctctgaacctgtttagctcttccttgtgaggcgatggtgacttacttcaagtgaagggcttgatgaatggcagcagctatcactttgtaagtttttctctctcggtggctctggtggcctccagtggctattctctgtggcagagccatggcagcagctggctgtgggaaggcagccagcagccagcggggaatttgccactttcgtgtcttctcctttcctgccgtgaaaaatcatctcctgtggctctgtggaaagggaagacgccatccctcctatctgacactgggctgcaggagtctttggtggctcctcagggcaactgagtccctttcagctctgtagctataacacatcgcttcctccagtgtccacacctggctggatgcagctagtcttctgaggtgggactctgcctacctcctcgcctttttttttttttttcctttacatgacacctgttgctcacaggtacaaatcaaacgaagagtatatatatgtgcgaggccgcggccgagggagatatgtttgtgaggaatgtggaattcgctgcaagaagcccagcatgctgaagaaacacatccgcacccacactgacgtccggccctatgtgtgcaagcactgtcactttgcttttaaaaccaaaggtaagagacagttagctggggcaccacctgcccatggcagggatccccccctgggggagccccagcacagagccctctgcctaaggactggagtacccccacatcctgaacccccacatcctgaactcccacccacttggtagccatggcagagcagtgtggctccagactgatccgtgatgcccacagctgccacagtcacacaaactcctgcccatattccgcagcctctaagtccacactttgtggttctctgtagacctcatcaccccttcctctgcatgtcttcatggctctgatgacctctggcatgcacacttgtcacagtcactcttgcactaggggatccattccacttggagccacatgacacacttgcatgttcacttttccctattcctcctcaccacacccagagttctctgatccacccctcttctctgcagcgttcagcatagggtccggcttcaacctacctccacccccatcctgagagtctatcacttcagcttccagccttaccccacatcccacagagttaggacagggtctggcagtcatttgtgagaggaaggactggctgttgagagcgtgcatctcagagagcaatggcaggagatggtggcctgggcctgctatagtcttgaggccctggtgggatggacatgcaaggttcttgaatggggcacttcccttgttggggggtcctatagcttgcttgcagagaaagatggtggaccttgcaaggaagctggggtgagcaccccagtgggttttgcctctcacactttgcctgtgtttggatgtgaggatcctggcttctcttctgagttaactagaggaggagtcaccgggggctgcagagacagaactcaaggcagacgttggctttcctcttgtccttccttctgaatctcagtgggcagggcaacagctaaggacagggggagccgagccctcaaggctcctgttgccttctgctcttgccactgggtcaggagtggcttgtcactttcccaggcccagtggcctcttccggcatgccccactactcatttcttcttggtagcagaccctgctctcctctgtcttctcaccatcatcttcgagctgagcacagtttcccaccatgatctggaactggatggagacacccacccttccacttccttttcctggtcctcttccttagcatctcagaagcagggtctcaaagggtgctgagaaggcagttaggtgggatcctgacccaaagcagcccagcttagtgcacatgggtcctctgtcccacgcccccatctgcggcctctccttttctgggctttttgtggaagagaggtgggaatcgctgactgataacgcaaacaagaaagcccttaactctgaaagtggagaacttctcgattgggccagaagagatccccaaagcccatcagcctctgtcccaaggacacaatgccctcatcttcctccctccactggctgaggcaacctctggatgaccacagtgctcttccaggtatactgagcgatagcatcgttctgccctcagcatgaagagccctgaggaagcctccactctgggctaccacagcgcacatgcacctggccccagtcccctgagaaacgcccacttacaccttggcctcactcattctggaaggtctgtttgaggtggcagtttatcccctgggaactttccctggatctctgtctctgagccaccccagagatccagacagtcctgagagtacatcctggggactgtggccttcacatttccagaggtacagggagtgccttcaggaggctgggttttgttcttggccagtgatcaggagcaagctaaggtcttcctccccgggcctctgagccctctgagcacatggaagtaagtctgaaacatggactctcgtacttccggcccagcaccgagtgggcagagttgataacagaggagaacagagattccccttgggcatagagtggggcgggaggccagagtacccggctttccttagagccacatctctgaagccctgtcatccgtcagttgtgagcacctcctctcctctcaggacctgtctgtctgcctcctagccgggtcttgcccttgagttgtgattccagccaggatgtatgggtactggcagacctcaatccggtgtctgcaccatctggcaatgcctgtgccaggactcttcttgtctgtctctgtctgcctgtttgtgtcttgtctttgtgtctgtcacacactcaggtggcagtttggtctctgggaactctttgaagagggtctcatgtgtgaggcaggaggaggtagcaggctagccctaggagagtccctttcctctttttagattctttctagaggccagaggagtggctgagctatggacaagcccttacactgatctcctaggagacagaagtggtagctgtgggcaggcccttgttcagcccaggagacaaggtgatgtctggtgctcttgctagagccagctccccttccagacacttgctcttccagccgtccactcaacctccgcttccagatgccaggctggtttgtccctgagggctgggggcaagaaaatccttggctgggcaagcctcctccctgtagcttctacaggatgttgacaggagcaggacagcctttgggggttgggctccctcctgcctcttcagagagcccctgaggttcctactcaagggtgagagcatcctatgatcactagccccttccctgtccagtacactgcctggcagagtcagagccagagacctagctcactggtagagtgatggcctaccattcacaggcacaatattaaataaaagagattgtcactgggggtggggtctgctctgggccagctgtagttcactcccacgtgctttgccttgtgaccttcgcagtatttccatgaggtgggtatttaaagaaatagaaaaccgggaccctacagagtaaggaacattgaaaaacttactcagggaacatagctagcagtacagagcccagacctccccataaccctcctccaccaggccatctagctacaaaaccaccgcaaggccagccacgttcgagggtcccaagacctgagtctagccagagcttttcattagccaacgctgtggttctgggccagttgtttcactgtgctggtttgcaggagccctgccagcacccaggacagccaagaatcttgcccaatgatgtcatcagcacctgcgcccagagttaaattagaaacagaagaactgagcctagtgggttgaaagacatggtctgtggaatcccacccaccacttttctcctggagtgcatttcttgagagactacaaacactgctctagcggtgtgtctagcctggttgactagaaatctaaactctacaggtataacgtatatggcaaatgtcaccggtgtgactgagggtagtcagagaagggactcaagaacgggaacctcagggcagttgggatctctggcctacagctctctcgtctcacctgctgctcgctcagacaatgagcatgaagggcatgcgactggctcgggagctctccatccaggtgcaggaaggaggcccaagctgggcagggtagagttggatgatgagtgggaagagaaggagttagtcctctctagtcttggccatcgtattcacccaatctcacttgtgcttccccagcagcctcagccgaaaacctgacgtttctgagtggagatcacccttggttaggctatgttcatctgtctgtccatctctcttcccattagctctgtctcctgtctactcatctaacagtgtccctgttcatgcgcccccccccacgcacacacacacacacacacacacacacacacacacacacacaggttttcttgtccccacccccggctctatctgtctgcccattctccttttcccctctggactggcctcccatacattcccacgtgtggacatccatcctccgatcatgtagccgcccatctttccatctgcttacaggccaacttccaccagttcccctgtttatttttccccgtggaccttgcctcctctgtctgcctgcctgccatcggcttctcctccagtgtccatctgtcctcatgcttctatctttctctccatgttcctccattcgccatacctcgtccccctgtgcactcgttcccagagactccatctttccattctacctccttccgtccatccattcagactcaacaatttaaggctcatgggacagcgtacctgaccccgggagcttcagacatgttataggatcagccatgtggaaatacaacagtcctcagagcacaacccaaaggaacttcctgtgacgtctgtctgtgttctctggggacaggacagggagcttagcctctcctccctgaacctgctgtccacagagctcctcaccctgcagcctgtcacaggtgtgcaccatggagaacctgacatcactgttgctgttgttgttaccctggcctcagaagctatcgctccagttccccagcctatggggccaggcctacaacttggggcagtacctcagggcttcacagagccttggacaacccattcccatagcactctagtcctctgtctgcactgtgccccagagagggggctgtccctaagacagtcccagcctgcgtcccagagcctgtggggctcatgtcccttgctgctcacctcactgctcctgcaaggaaccatgccctgctttctctgcttagaccctaaggattggcctgattgtagtatactcggtcagaagaacttctcagcccgcagctactgtattagtcatgagaatcccatgtcactccagcatttaagattgcaaatcatcttatctgagtgtgccaccagccccggggcccaaacataagacagaagcagaagaaaaaaaatgcacctgagtggtctttcaacttctctgtgttttaaccagcatctctggttctcactgtaccctgccccctcccccccagctgcatgccctccctgccccagctcctgtgtttgaccttctgtagcagttacagttgcatagtctggctgcatgctggagcacaggaggccttggcccctgcccagccctcggcacttgtgtaaggagctgtggcctggcagctgtgtattgccctccccctaccaccaggccatgagtctgttctcatttctttccagggaatctgactaagcacatgaagtcgaaagcccacagcaaaaagtgccaagagacgggggtgctggaggagctggaagccgaagaaggtactgtaccaacctcctctttccctaactccctctccacttcacatccctcccccttacccctgaccttccccctttccagacaccctcatttctactactgttccccttcctctctctccctcccaccatctttcccttctatgtcctcccttctagtttgctgaacaactgggaagcagcaaatgttaaattcataaaatgctccccagtgccacagagccagtcactgtgcagttcagtataacctagtgttccagcagaaagccagccccaacgggaactcggcgcacccagtgtgtgccaagcacagtctaaacacgtgccttgagttgtcttagtgggacctggatagatcttcaggcacttaactagaagtctcttctgataggaacctgcaatgtggtctgtgggactgcgagtgtcactgagaaaggcaaagctagatcgggtaggtccatcccttctcggccctgacacatcactacaacctgactatggtcctccagcatcagaaacaagctagaggcagactgatagcagacaaggcaggggacacgggtaaggagggaggccagaggggctgcggcagatagaatgacaaaccttagctgtagattctcaggagtcagggtcagggcttagtgtgacaagacgaagaagggagtgggtcaggggggtggggggcagagaagaaaggagaaagctgtggtttttattttctgtttgtgaagcaatctaacaagagttagatcatgtttcttttaacactgaataaaccaatgtttacaacaatccactcaaagcactgtcttcacaaattataatgtgaggcccccatgttgtcaaaatgcatgccaggctactatagatggtgtcctggcgagggccctgtaacataagcccagacatgggaccatgaaggaccatgaaagacagggggccttggctgacctctatcctctatccttgagtataatgggagtgatacatatgtcctctgcctgtgtgcggagaactccagcaggggtgtagggatgtgatctaggccagacacatgagcacagttcaggtgagaagtggtctgattccagatgctttcagagactgagcccatagatggtcctgctacatcatagagggcagaggaggggagggaaagggccagggatggctccaagctttgtaacctaagagactggaaggatggagttgttacttcatgcaccaaggcagacccagcgacgggcattaggatctgggtatcctaaacatagagttggtagcaggaactgccctgaagagcaccaagccaggatgccctagctccagcacactgctaaggaatgggttgtcagccactgccaccctgtggccagtcttagaaactgcacccagaaggttctgtccagtgccttccactagatttgaaagcactaaaggcagaaaaaggcccatatggaatatcaggaaaggggggggggtgctgagcaggcaggggaaccctttagatgcctgcaggaatcagatgtggagtgcctgaagtagtgtggtctggagagggcttcttccatcatccccgccacactgggactcatacagggggccttcactttctcctcagtaaagaagggctttggggcctgtcttgatggatgtcaggagatgctggccccaactccctccccagtcaggaccctgcttcagccttcatgtgcagatgctaacagtgccaccctggccacctgcctatgggagggggagacacagacagaggagatggtagcagacacaaaaggacataaaccagccattgtcacccagcaagaggagggcagggtggggattcgtggctgcatctgcttctcaaagcataatgccattttgaactgtagtgtgagacgtgaggactatgaaccttagttctgactaggccaggagatagctggatgattgtggggcaggccgtggccttctccacgcttgggtttcactatgtgagtgagggccagggctgagtaaaacctgaggcctgcagtcagggctcctgccaaagtcctaggtcagcagaatgagctgatgcagggctttgcccctccctccatcccctgtctgttatgtctcccatcacccattcccctcgaggcctcgtctcttcgctcccatctgcccaaactctgcccttggaacctccctctgcctgacaactccttctctacacacaattttctctctctttcctagtgaatgttcacgttatccactttggtacctgaccatggaggtgttagcatcactgtttctggccctcctgggcatggtggagagccagggctcggggactatctttcctgaccaggagaaatggaatattggtgcccgggcgagcgatagggatagtggacacattaggccacctggaaccagttcaaactggtcatgtcacagcagtctagtgatgggccaacagagcacaaactctccaggtcatcccccagattgtggacagctgaccatttcagggatgcctcggtctccattgctgatggtggcacagcctcaccagctgatggaaacctccactccataagaatccagacccggaagctgacgttcagagtgctccacagggcaggaatggcaggggtcaggcctgccctaaagactgaggccagcctagcccagcaactcacagaagctaaactctgccatctgcccagagccgctgtgtaggccagcctggtcatgttagcatctggtttgcattttaactgaccgtgactgtctgctggaccagccagcatgccctgtcccagagtgatagatgccatcagtaatggggtcatagtggctgtaattatctgggcccttgctgtgtaccaggcctgcattattttttcctctcagaaaaagccatacagtgagacatccacttaacaaaaggagagactgaggcacagcattacagctggctcgtggtgaaacccacactgagaaaccagaaagcagatgatcttgtttgccccagtgaagccctaggccttacttgggaaggttacctgatcccccttacctcggtttccttatccacagcatgagcgtaagaatagaacccccagttccccagtgatgccaggattctttgagggctacatgaattcacgtacctaaagcccgcagagctgaacttgttcgtcgaggcatgaggtcattgtacactattatttacagagtattcttctatctgctatgtcacttggtcgtctgccacgtggcactgtgcctagttggcaggcagtgaaaccgggcttagcctgaagtggctgtaatcttgagtatcctgtgctctcccctcaggaaccagtgatgacctgcaccaggactcagaggggcaagagggcgccgaggctgtggaggagcaccagttctcagacctggaggactctgactcagactcagacctggatgaagatgaggaggaggaagaggaggaggaagagagccaggatgagctgtctgggccatgctcggaggcagctccgccttgcctgccccccacactacaggagaactcctcacccgttgagggccctcaggctccagatagcacttctgacgaggtcccgcaaggcagctccatctcagaagccacgcatttgaccgccagcagttgttccacacctagccggggtacccaaggccttcccaggctgggactggccccactggagaaggacatgagctcagccccgagtcccaaggccacgtcccctaggaggccgtggtccccaagcaaagaagcaggcagccgcccctcactcactcgcaaacattcactcaccaaaaatgactcgtctccccagcaatgttcaccggcccgagaagctcaggcctcagtaacgagcacacctggtccccagatgggcccaggaagggacctgggccctcacctttgtgggtctccaagactggagctgtcctgtctcactccctaccccataggaagagaagcgcccgctggactcgagcgtgccacagacacaggcacccccagatattcacccaccaggagatggtctctgggtcaggccgagtcaccgccacagacagtgctgccagggaaatgggccctggctgggccctgcagcccctcagcggacaagagtggcctgggcttggggccggttccacgggccctcctccagcccgtgcctctacctcacacacttctcagcagaagccctgaaacgtgcacctctgcatgggtgagtccctgctgtggccctcccgggggtcagaagctgcccattcacaccctctgcccctcaccccagagccaggccggtattcctgggcatgtggcaagcttttcttaggtccctgtgtcagctagttcattgcactttgaggcaccctcagaagccccagacatggctctggtgttcacaggctctgggttcaagccctagtgggcagtgtagccttggatatggacgtaacacttgtgtaattcttcggccatcacttccctgtccatgtatgtccttggagcagtcgacagctttaccaaaatcatctgtccccatctcctccctgtggaactatgacagccttgcctctgtcaccaccatgccccaccacaccccgctactgcccatcacccttccttgacagtgcttgccttacagtatctgtaccactgcctcactgcccctccccccacccccgaggctgacactgtccacggctggcactgtccctgttgacatttcttacactgtgctgtcatgaccccacagcatctctcctggaagaacactaactgaagcatctctcttgcctcattgaacttcctgtagtgaaaggttgagatctttgggtgggaatccatatgcaagggtaaagttaggccaagaccatcttaagaaggggagaggcagaagagccaaggtagaccagggtgagcacagagctccccccacacccccccacacccccacacacacacacaagagctgcctcctacagatgtgggccaacatgtacctctaagttgcccagttggaagcttgccgagaactgcagtaggactcctgattctggccgtactcaccagccgtactgcaatctcaggcctccccaccctctataccgttagccctcagttctgcaggcacgtaacccttgccttctcccgtcttgttttctgactccagcggaagactgagtcccgaagtccatcagctggccctgctcctctcttcccccgaccattctccgcccctcatgacttccatggccacctccctagccgaagtgaggagaacctcttcagccacctgcctctgcattcccagctcctgagccgcgccccctgccccctcattcccatcggtgggatccagatggtacaggcccggccaggagcccagcccaccgtgcttcctggaccctgcgcggcctgggtcagtggcttctcagggggcggcagtgacctaactggggcccgagaggcccaggagcgcagccgctggagtcccacagagagcccttcagcatcggtgtcccctgtggccaaggtctccaagtttacactctcgtcagagctggaagaggaaaggaccggcagaggcccaggaagacctcctgactgggaacctcacagggctgaagcccctccaggacccatgggcacacacagcccctgctccccacagctgccccaaggccaccaggtggcaccttcctggaggggcctcttggggtcaccacacacactggccaacctaaaggcctcaagcttcccaccactggatcgcagcagctccatggactgcctggcagagacctccacttactctccaccccggagcaggaacctctctggagaacccaggacccgtcaaggctcccctgagctcttaggtagaggggagctcaggacacctctattcctgcccaagggtagtggccccccaagcatctagcctctacagctacttcagcgcctggcctccagtgtcggcagcagacatgcccagacaaccgcctggagtcatcttgctcccttgggcatcctctcccatctgtccatctgtccatctatccatgcagcttctgctcagccccatctgttctatttctccacatatgcagttacctgtgcctttttctagaccttttgttgcttgagaaaaaaaaaaagaaacaaaacaaatcacacacatccataaacaaaacaaaacaaaacaaaacgcatccctgaggagctgaaggctgtgagtgtgctctggggacaaggctggaggagggaatctcacctccaccaccaccatgtgccacatgggcagctgtccccacctcaaggtccaggagagggtctgtggcactgagagagaagaagaaaaggggagaaaaactgtaattaaattcaaaggcaagcactcctacagtcagatgcccaccatccccactgaaagacgcacagctcgtagccgcccttctctgccatcagagggacacaaatacaggcaggaaccaatctaccactccccaccctacccgaccaaggacattatcttttatcctttttttttttttcaagagtaggaaccaaaaagaaaaactactttctagcatctcagcagcacagactagcagcaggaaagagaagaattctgtagtatgaactgtggctctcacttctcccttccacaccccacctcccctcccctcaccccaccccatcccccaggctcataaaggagcccgggttgcccatctcctttctcctatacactataggtctctgcctcccaggcctggccaaaggctggctcctctatgattagaaatacctgcaggatgaagggaccaaggccggactagggatggtcctagtctgggcctgttttgagcctggggtttggattggttcacctctgtccctgaggaacaacatgtcacatttccttcatggctggattaacgtatgtgtgtgtgtatatagatacacagagagaaaccaaagatggtgtttggtactttctccagcctcctcagattctcctctgttaacttaggggatttgtaaattgttccaagtcctttgaatttttctccagctcccaaggcaaaaactctacttaaaaaaaaattatatatatatatatatatatatatatatatatatatatatatatgaccaaaaatttaaatcccaagttgaaatatggaatttgacctgttgcatgctttaaaaaaaaaggaaagcaagccccctgcggcacaggttctatggctaccatttctaagaccttccagaaataattttctttaccttcaccaaggaagagagagagaaatggaccatcatgaggagacccctcctacagccttgtccccaaatcacaaagcctgttccagccatgctagattctgctgtcacagtctacaaagcaagggcctgtctctgggcatcaggctgggtgtgtggctgagggctcacaggagggctgcgatgcaaggctaggggctgcctgtacaaggccacccccgtccctccctccagcttatgtcattctggtccttgctggatgggcagatcagccataggcccaatgtccaccccagttacctggtttctcctctgcctgactcaatgcttaagatgtaagcgtcagtaggactgttgcctctctgcaagtctcctgcctacctgggagaagctgtcaggaccaagctggaaggaagagggtagaagcctgggtgctggtcagcccaagctggaggcttttctcccttctgcctatcagccctaacccacaggccctactgatgctaagggctgagctggacaaaaacatcgcctcaaactgggcttggtagctttctaggctagagcttctggccattggaagaaggctagctcctgaccttgggatacctacacctctctacttcactctacacccaaatctatctatctttctccctctcccctccccctccccctcccccttcctccctctttcctcacttctctctccccttccccccatgtccacttctgcaacctagtgacagacaaatgtgtctacagaatagcccccacagttactaggcagccctgactcagggaactgggatgtaacaaagactaggtattggatatttgcctttaggtgacagggatagaatacatagagtctcaccgggagtggtgctccacgtgcccagagggttgcaatggatgccacttccaggcacagctctaagctcctcttccaagttgtctccccccaacccccaccccaagcacatggccccagcctaagcataccttctccacctggaaaaaactctcactccaggaatgtgctttgggctcctcgcccacaaccagccacttctgactttgcagtctgcctgtgacactactgtcaatgatgacagtctagttcagacatctgtgcggggtctactgaaacacactggcacaatatggccttgccacagactctgcttctccttacctgtgacagctggggaggtctcaaatcaaatcagccctgcctgggtggtggttccaagccactcatccctgaggcctgacccctagatgctcttccctgggcaacctcacatcattctaagtctaacttaaccccttccacaccaagggcaggcccgcttcttccaaccccccatcatagctgatactctggtcccagccaccaagaccctccaggggttctgacaggggtagctacctattttttttcccagacacaaagtctctgcctgcctcagcgggcaaacctcttaagagaaataactcccaggtccctctgggtgttgtctgccccccacctggcccccagaagaaggaatatgtctgagctgaaatctcctcctagtctttgctccagctgactcttccaggtgacgtcctgggagacagatctgctctgcaatgtcttctgagaaaattcctaaggtcagtgccgccaaattcgctcccgtgttgtggttcctgtctgcttggcatctgaaaaccgcttgggcactactggtcactttcctcagtgtggtgatcaaggaggaagggaacggtgcaggcaaatgtaagatacttacactctgtaagataaatctctgcctctgttgtttgttttcttttttaaaggtgtacgcattctgtacgtgaaatcgtctgtagagagtttccacgttcttaaatggcaatacattccaaaactcgtactgtagatatgtacagcaaccgcactggaaagggggtagttttgcctgtggttttatttaaactccagtttctacacttgtatcttgcagttgtcggtatggtattcatcagtgcaaaagaaaaacaaataaaaaaaaaaactcaaacaaaaacaaaagaaaaaagaaaaaaaaagaaatcttacacaggtctaaagcacagagtctgttatacaaaaggaaagaatcgctcagtattggtatgtgtgacccttgttgtaaatcccatctgtactgtgaatgagacgtttttacaagtataataattgcctttattacagcttgggctgggtgttcagcctgaagatattttttaaaaaaaaatatatagcacgttggaataaatttgaaaattcccaacagagccctgttggcctggctcatggcttttcttcctcaattttaagtttagttttatgtatgtgtctgtgtgagtgtacgttcaaagtagggggtgcccacggaagtccgaagaggatatcagatcccccgaagctggggttaaagatgttagtgagctgcccagtgtgggtgctgggaattgaaccgaggtcctctggaagagcggcaaatgcttttaaccactaagccagcctcaccctggcttttctggaggataacagaatattagggttaggagaacactagatgtcagaagcatttatttcattgcacagccatcagtgcataagaaggaaatgatggtcatggccacatagcctgggactcccttcccctcacatcctagcctgtcagtaaatgcctcagattgtcaccatgggagagaagcctgacttcgtccctaggattgccacagcgacattttacctggctttaagacctcaggactccccaacagtcctggaactcgggagtctgaagtcttcatctatggccatgctgccttgaacatggccattctcatcggtctttgaagctgagaagaatggggtctggttagtatctgggagttatctgaggtctggatattgctgagttggttcttctactctgaggagatgtcctcagcttccggtgggtacagacacatccaatctcctgactcctccacacttctatgatcccttctcaacgtgcccaccaagacccttaattacagcagctaagaccctttttctaaacaaggaaattcaggaattatgacataaaaccaccattgagagccactattgagccagctataggatggaacctgaatccagatcctgccacagccactgattgcctgtgtgagcatgggaaggtcatctaacctctctgtgcctgtttgctcatctgtaaaataggaggtgatgctccacctctgagggccattaggaagatgtaaaaagatggtgcaggcagggaggccatggataccctgaacacagtggggcttctgcagtttatgcacagatactgggacagccaggatggcaaaatgtggtttcccaacttctatattcaactcagtgccagccaaggctgccattgggtggggtgatgagcaagagagagagggcccacctgcagagagcttctgtctgagctggctgtgggcagtcactttgccacaggctcaccttcagcagtgtcagagaacaaaggctctaggctacaagccattggagtatcatgaaagctcttctagaaaaagcccggtaacagcaaggaaaggaaaacaggccaatgaccaagtggacagcccttggaacaggtcagtaagccaagtggagggcccttgggacaagccagtgagccaagtggagggcccttgggacacacgctaaccagaagttcagctctaagggcctaaaagggtgggtttacttaggcaaagaggatcaatgccaacttacagaaaagatgtaccagcaccacccctgccatgtggtgggctctttgcagacataatgagagctggttggcagagggctggggagtggaggggatactgaagaaccttggaggccaagatggaaaaggatgctttgtcctagacctgggcgcaggcagctgggcagtagcaggagagcttcagggatggtctattcattatggggaacaaatgctgaacattgtggctggtggagtaagagaggcctgggtgggggaaggagacttgggagtccagaaaaaaagagggagaagtcagcatgtcttagtgacagccacagagagtgttcggtgaggggttttcttgggaactgagaagaatcgcctgagaagctactaacaaagccaaagagacctgagaagacctgagggagcattgagggcagtgagagaaagtccccagaaaagaaggatggtatcttacaagaccagaggctgtggtcactgtctgcttcactgttcattcctataatggcggtcggcagccagaccgtactcttccaagcatggctcctgccagcccacagcagagtcccagtgagtggggaagagaggaggagaagctgtgggccatcaggtgaggacggaggatgtattagttagctctctagtgctgtgacaaacagcaccatggccagtggcaacctggagaggaaagggttaatttcatcttatagcttgtagtctaccatgaagggaagtcaaggcaggaaccccgaggcaagacctgaagccgagaccgtggaagtgtgcagcttattgtcttgtttccccacagctggctcagcaggctcccttttacctcctgcccaaggctcacaccaccccagtgggctaggctgtcccaaatcagtatctcacgggcttgcctgcagggcaatctaaggtaggcattttcttaattgagcatccctctgcccacctgagtagcttgtgttgaactgaaaaagcaaaagcaaacaaaaaaacaaaaagaactaagcagacaaaagccatggccacacaatagttgttagaatgcagaaaagatgggctgtgatctgcctttagcttctgtctggggatgagaccatagtgaatggagcctgtggaccacagatgctgaagaggcagaggccaagatgtgagtgcctggtggcggtagtgcaggcagcaagtgaggatcttctctaatgatgacagggctggggatgtagatcaggtctaggagccagggtataccagtcaggacaggctccacagtgctgctgggacaagcatgcctgacatctgtggccgaaggcagcaacggcctcttccttccctcactgtacattcagtggacatcagcagagaagttctgctcaccccagtgacttagcagatccagactgatagctgctccattcctgtgttcccatgatcctcggaagcagagaaaaggatagtattggccctggcaacaaatatcctgtcagagtcagccttcattgtcaacttgcaggaatctagaatcacctgggagattggtgaggtatatgcccggtgtgtctctgaggtgtttccaaagaatggtctctgagcggggacgcacttaacatatgagcaccattccatggcccagacagaataaaggcgggggaagatgaagctgggtggagattggcatgcccttgtatactgccttctggtccatgctgtgaagcatactgtccaacttcacctctcctgccacagtgggctgagcccaccgacaccaggagccaaaacacacctttcgccccttggctgatggcaggtattccatcacacggacatagaagtaactcaaacacatccctacaagtctcattacaggaaagagccagacacacagtcaggtctcagggaggacacaggggtgctgggaagcagcctctgggtcgtacaaggttaggaattcccagagccaaaggagcagaggcccgtgatgagatggggaggggacagtgacagtggtgtcaccctcagaggggatgcacttttataggaatctggggtggggtgaccccaaagacagcattggaagcagagagggtaccctgctgaagtcatggtgtgcacggataaagaatggagccaggaggataccctaaggggagaacagaaaatggggacaaatagagtcagggacactcacacaaggcagcaggaaagaggagccctgcccagaagaggatgcaacaggctctctgtgtccagagctttgcaaattcagcctgtagtgctgacaactgcccagcatggtgagttcaggcgccattcttagacaaaagccagaagtggtgccagtaagactaaaggtcacccaagtagagtgacacatgcctgtaattccaaccctcatgaggcctaggcaggaaaatctcaagtcagaagccagcctgggctacagtgagagcctcttgctatggctggctctggtgcagcctttcaaggaatccaagtccctccccttatcctccagtccctccctggctctggagtagtgttgggtatcaggctgcacagctagctgcctctgtttggagtccagctgcagctctctccaggatgctctgtgcatttcacatcagttgctgctatctcctgcctgctactggctcagtgccaagccagacaaacactgccatgccactgggctcccaggtttttgtacaggtcaagagctggacccctttgagaagtgaatagggcagattgcatatttattacaggtgaagacagcacctaagatcacactctcacaagtggtagggctataatcctgtcgcatctgttccagcatccccagagagcaatggctgacatcttgcctaagctctgctgggtctccatccagatgtgggtgaagtccacaggactggaagatcttcctgtcattcctaacactatatccattctgggatcaggcctaaagtctttgcaggacaggccattgcaggcaggctagcctcaagaggatggtggtccacaggggcaagagcctgagaatgctgtggcctgggcctccattatcagcacgggtgatgtcctgaatccctgggagagggacatttatgacactgttatcttttgcatgatagggggcctgggctctgatacatgatctccatatttgattagctgcccatagagagtctgggcctctatagccctgggatccctattgaggcttgggtaccccagctcaaataccctgtactcctataatgacctcatccactttaggaagatacgagtgccaattgccctctttctgatgacaaaaatggaggtccagagccgggaagagcttggcctgaggccaggtctaggattcccatattctccacagatctacatgtaccaccccacctaaccccagtcccaagtgctactacccagctcttctgcccagctctgcctttttaggaaaggaaaagagcagccctggtggctggcaggcgggcaggcaggcaggcatgctaatccaccagctcccggcagctctggttacccgtggtttggggcccgggcagccctggctgggagtgccagctcagccaatgggtgccgccgctgagctactctggcagagccatacaaggcctggttgcctcccagtcctgatcaggcaaagggcagctccggtgtgccagtacccaccccacccctgagtctgccaggccggcacgtcctccaattctacctaatccagtctgagagcaggcaaaccttcggtgcacgtgcgcccggcctaggtctctctgaggtcagggatgtggcaccatcagagcagagaccagagtcagggaagaagcttagttggtcacagggacacccctcaatacctaatgaggtcagggtgattctggccaagacctggttcggactgcatcatctctgacgagtgtgtctgctatcaccccctttgaccttgtcacctctgcttttgcaaagtctgtggcgttcataccttgtagtgtgttcccagcatctcactcaccctaagactacaagttcctctaagaattagggatgcccataaatgcctacatgttgtgagacatgcatccttggggacctgtgtgcatccattgtcactgctgtgaacgataagaccttatctcaaaaataagttgaacagtgatagaggaagacatgtgatgtcagcctctggcctccatatgcatgtgtgtgcacatgtgcatacacatatgtgcacacatacagagatatacacacataaaccatgcatacatgtgcatacacatatgtgcacacatacagagacatgtatacacataaaccatgcatacatgtgcatacacatatgtgcacacatacagagacatatacatatataaaccatgcatacatgtgcatacacatatgtgcacatacacacacacacacacacacacacacacacgaaccatgcataaactgctcgagtgagcacacacacacacaccggagattatttgtggaaagcacaatattgacaatcagggaaagtaagtcacagagcagagtggctctttctttacccaattccagtagcattcaacctttgacctagacctctgtaccctcaagcctcccctgtattcaggccctagagggaagcagtctggtcccatgcaaaccagtgtgaaggcaggattgaaagctgtgacctagttcctgagtgtggtaggacccctgcaccaacattacctaggcattggcatggccacaaccatccattttagagcatctctgaccacggcaaacaatgagatttatcacagaaggcacataagcatccttataagtcctacatagccaagctatgctcagggccaaaactgtggtactgtgaagggccactgacaggtgagaaaaacatgctggcacgggtgggggtggcaggcctgcctggcattggactctgtttgctcacccaagaaaagaggagataaatatagacacaggattactcagacatagcctgggaaaaccggctcctgagccttgacttcggctctgtcccagcctcaccctcagctgcctgcctactctgtgccaactgccgggcctgccccacctccttctaggactccctacctggcaacctggggacagcccttcctatctgctctctctgggtatggagcagaaattatagtctggagagagttgagtctagctgggagcagcaaagccctgtgtggggttaagccacaggctcagcttccattccagcatagactgtttccccttctgtggagtagatgaccagtgcaaccgtccttcagcgttcctcggcctgcatgtaggatgcgatgggagaccactcgaccattagggatgaggctggggtatcctgaatgagaaggtgctagccatagcaatgtgcataggggctgtaccctcaggccacagagccaagacacagagagtgaggtcccacccgctccacttctcagctgtgggactttgggaaatctctttgacctctctgtgcctcagtttcctcacatctaaagtgagaagaggctattaataataatgacatattattactacgaaatataataaatattacatagtagaataataacttaataatcacatgggccattagaggttagatgttactacatgcaaagtacaccttactgcaaggcccagcacatgcaaactgttacatgcaaactgttacatgctttatttagtcaggacaggtggggctctgagaccctctccttctctgctcactccatgaacctggccgcatactacataggtcctattgtctaggcccttgcagttcctcctctctatcctgactggcagcctctag

SEQ ID NO: 903 - DNA, 8761 bp, Mus musculus
acgctaccccttcctcagggagaagcagcgtgtaagcagaggctttgtggccggagtggacatgaatgctggcttccagagagagcagcgcttcagttttggtcatcggaagtggtgcctgcagcgcagaagaccgtgatttctcctccgaggctgctattctccaatacagaattcaagggcagaagagggccgccccagcatccattgtggcatctctccggcccggactagggatgacaggcccatggacatggatgtctccgaccttcagctgttcatatagcacacaggggactcgtgggggccgcttgtcacccaaacccactcaatggcaatactgacatcttccaggctgttttcaagacaggcgttcaggcagaaaaatgccagtatgctttctgtctgcagagtagtgggctatgccacaccaatatgaacagcgtgggccctgggacctgctctgagtccacttgcagccactgacacttgaggggattaaaaaaaaaagcccagccccaaaaccatcgtggggttggcttccatggctcttgaccaatgtggccaaagctagacacctcgggacacttggattattcataaatgcgacctaccccaaactccctgagtagcatctgaagtcttgtgaaggtcatggatcctgaccaaagcatcaagggcaccaagaaggctgatggaagtccccggaagcggctgaccaaaggagaggccattcagacgagtgtttcttccagtgctccatacccaggcagcggcactactgctccctcagagagtgccacccaggagctcctagccacgcagcctttctcaggcccctctcaggagaaaacgggccagcagcagaagcctgcccggaggccttccatcgaggcctcggtccacatctctcagcttccgcagcaccctctgacaccagcattcatgtccccgggcaagccagagcatctcctcgaggggtccacgtggcagctggttgaccccatgagacctggaccctcgggctcctttgtggcccccgggctgcatccgcagagccagctcctcccatcccatgcttctatccttcctcctgaggagctgcctggcatccctaaggtctttgtgcctcgtccctcacaggtctccctgaaacctgcagaagaggcacacaagaaagagaggaaaccgcagaagccaggcaagtatatatgtcaatactgcagccgaccctgcgccaagcccagtgtgctccagaaacacattcgctcacacacaggtgagaggccctacccctgcggcccctgcggcttctccttcaagaccaagagtaacctctacaagcacaggaagtcccatgcccaccgtatcaaagctggcctggcctcgggctccagcagtgagatgtacccccctgggctggagatggagaggatccccggggaagagtttgaggaacccaccgagggagaaagcacagactctgaggaggaaacgggtgccgcatcaggtccctccacagatgttctccccaaacccaagcaccccctgctctcaagtagtttgtacagctccgggagccacggttccagccaggaacgctgctccctctcccagtcaagcactggcccatcactagaggaccccgccccatttgcagaagcctcatcggaacatcccctgagccataaaccggaagacacgcacaccatcaagcagaagctggcactccgcctgagtgagaggaagaagctgatcgaagagcagacattcctgagcccagggagcaaaggcagcacagagtccgggtacttctcacgctctgagagcgctgagcagcaggtcagcccccccaacaccaacgcaaagtcctacgcagagatcatcttcggcaagtgtggacggattgggcagcggacctccatgctggcatccacctctacccagcccctactgcctctatcctcggaagacaagcccagcttggtacctttgtctgtgcccaggacacaagtgatcgaacatatcaccaagctcatcaccatcaatgaagccgtggtggacaccagtgagatcgacagtgtgaagcccaggaggagctctctaaccaggcgcagcagcgtggagtccccgaagtccagcctctaccgggactcactatcgtcccatggggagaagactaagcaggagcaatcactgctgagcctccagcacccacccagctccacgcaccctgtgcctctcctgagaagtcactcaatgccttctgccgcctgcaccatcagcacccaccaccacaccttccgtggtagctactcctttgatgaccacgtcgctgaccccgaggtccccagccgcaacactcccgtgtttacctcccacccacggatgctaaagcgccagccagccattgaattacctttggggggtgagtacagttccgaggagcctggaccgagcagcaaggaccccacctccaagccctccgatgaaccagaacccaaggaaagcgaccttaccaaaaagaccaagaaggggttcaaaacaaaaggcgcgaactatgaatgtaccatctgcggtgctcggtacaaaaagagagataattacgaagctcataagaagtactactgctctgagctccagatcacaaaagcccactctgtaggtgctcatgaagtggaaaagactcaggctgagcctgagccttggtcccagatgatgcattataaactgggggccaccttggaactcactccgctgagaaaaagacggaaagaaaagagccttggagatgaggaagagccacctgcctttggcagcccaggcccttcagaaacagctcataaccgtcccctggggtccaccaagtcaccagcagaagcaagcaaatcagcgccctctctagagggacccacgagcttccagcccaggactcccaagccaggagctgggtcagaaccagggaaggagaggagaacaatgtccaaagaaatttccgtcatccagcacaccagctcctttgagaagtctgacccaccggagcagcccagtggcctggaggaagacaagcccccggcccagttctcatccccaccacctgccccgcacggacgctccgctcactccctgcagccaaggttggtccggcagcccaacattcaggttccagagatcctcgtgacagaagaaccggacaggcctgacacagagcctgagccgccccccaaggagcctgagaagacagaagaattccagtggccccagcgcagccagacactggcacaactcccagcggagaagctgccacccaagaaaaagagactccgcctggctgagatggcgcagtcctcgggggagtccagctttgagtcctccgtgcctctgtctcgaagcccaagccaggagagcagcatttctctgagtggctccagccgctcggcttcattcgacagggaagaccatggaaaagctgaggcccctggacccttctcagacacacgctccaaaaccttgggctcccacatgctgactgtccccagccaccacccacatgcccgagagatgagacggtcagcctcagagcagagccccaatgtgccccattcctcacacatgactgagacccgaagcaaatcctttgactacggcagcttgtcccctacaggaccatccttagcagtgcctgctgctccgccacccccagccgccccgccagaaagaagaaaatgctttctggtacgtcaggcctccctgaacagacctccagaagccgagctggaggctgtgcccaagggaaaacaagagagcagtgaggagcccgcagccagcaagccttccacaaaaagctctgtgccccagatctctgtgggcactacgcaaggtgggccttcagggggcaaaagccagatgcaggacaggcccccactgggatccagcccaccctacacagaagctctgcaagtgttccaacctctcggcacccagctgccccctccagcctctctcttctccttgcaacagctcttgcctcaggagcaagaacaatcctctgagttcttccccacacaagcaatggccggcctcctctcctccccatactccatgcccccgctcccaccttccttgttccaagccccaccacttcctctacagcctactgtgctacaccccagccagctccatctcccccagctcctgcctcacgctgcagatatccccttccagcagcccccttcctttctccccatgccatgccctgccccttcaaccctctccggatatttcctccctctgcaatcccagtttgcactgcagctccctggtgaaatagaaagccacttgcccccagtcaaaaccagcctgccccctctggccacaggacctcctggcccctccagcagcacagaatacagcagtgacatccagctgcctcctgtgactccccaagccacctccccagctcccacatcagccccaccactggcccttcctgcctgtccagatgccatggtgtcactggttgttcctgtccgaatccagacccatatgccatcctatggaagtgccatgtacaccactttgtctcagatcttggtcacacagtctccgggtagcccagcaagcacggcccttaccaagtacgaggaaccctcctccaaaagtatgactgtttgtgaggctgatgtatatgaggctgagcctgggccatcgagcataagcaaggaacaaaacagaggttaccagacaccatatctgagagtacctgaaaggaaaggcacttcactgtcttctgagggtatcctgagcctggaggggtgctcatccacagccagtggaagcaagcgcgtcctttccccagctggcagtcttgaacttaccatggaaacccagcagcagaaaagggtaaaggaggaagaagcttccaaggcagatgaaaaactggagcttgtgagtacctgtagtgtcgtgctgacaagtacagaggataggaagaagacagagaaaccccatgtgggtggccagggccggagcaggagggaggcagaaacactgtccagcttgtcttcagatgtatccgacccaaaagaactttctcccctctctcattccacattgtcccatgggacagccccaggctcagaagctttgaaggaatatgcccaaccatctagcaaagctcaccgaagaggtctgcctccaatgagtgtaaagaaagaagatccaaaggaacagactgacctccctcccctggcaccccctagttctctgcctctgtcagatacttcccctaaaccagccaaattgcaagaaggtacggactcaaagaaggtactgcagttccccagcctccacacaaccactaatgtcagttggtgctatttaaactacattaagccaaatcacatccagcatgcagataggaggtcctctgtttacgctggttggtgcataagtttgtacaaccccaaccttccaggggtttccactaaagctgctttgtccctcctgcgatctaagcagaaggtgagcaaagagacatataccatggccacagctccgcatcctgaggcaggaaggctggttccatccaactcccgaaagccccgcatgacagaggtgcacctcccgtcgctggtttccccagagagccagaaagacccagctagagtggaaaaggaagaaaagcaagggaaggcggaggaaggtactcccacttccaagagaggcgagccggcgagggtcaagatcttcgaaggagggtacaaatcaaacgaagagtatatatatgtgcgaggccgcggccgagggagatatgtttgtgaggaatgtggaattcgctgcaagaagcccagcatgctgaagaaacacatccgcacccacactgacgtccggccctatgtgtgcaagcactgtcactttgcttttaaaaccaaagggaatctgactaagcacatgaagtcgaaagcccacagcaaaaagtgccaagagacgggggtgctggaggagctggaagccgaagaaggaaccagtgatgacctgcaccaggactcagaggggcaagagggcgccgaggctgtggaggagcaccagttctcagacctggaggactctgactcagactcagacctggatgaagatgaggaggaggaagaggaggaggaagagagccaggatgagctgtctgggccatgctcggaggcagctccgccttgcctgccccccacactacaggagaactcctcacccgttgagggccctcaggctccagatagcacttctgacgaggtcccgcaaggcagctccatctcagaagccacgcatttgaccgccagcagttgttccacacctagccggggtacccaaggccttcccaggctgggactggccccactggagaaggacatgagctcagccccgagtcccaaggccacgtcccctaggaggccgtggtccccaagcaaagaagcaggcagccgcccctcactcactcgcaaacattcactcaccaaaaatgactcgtctccccagcaatgttcaccggcccgagaagctcaggcctcagtaacgagcacacctggtccccagatgggcccaggaagggacctgggccctcacctttgtgggtctccaagactggagctgtcctgtctcactccctaccccataggaagagaagcgcccgctggactcgagcgtgccacagacacaggcacccccagatattcacccaccaggagatggtctctgggtcaggccgagtcaccgccacagacagtgctgccagggaaatgggccctggctgggccctgcagcccctcagcggacaagagtggcctgggcttggggccggttccacgggccctcctccagcccgtgcctctacctcacacacttctcagcagaagccctgaaacgtgcacctctgcatggcggaagactgagtcccgaagtccatcagctggccctgctcctctcttcccccgaccattctccgcccctcatgacttccatggccacctccctagccgaagtgaggagaacctcttcagccacctgcctctgcattcccagctcctgagccgcgccccctgccccctcattcccatcggtgggatccagatggtacaggcccggccaggagcccagcccaccgtgcttcctggaccctgcgcggcctgggtcagtggcttctcagggggcggcagtgacctaactggggcccgagaggcccaggagcgcagccgctggagtcccacagagagcccttcagcatcggtgtcccctgtggccaaggtctccaagtttacactctcgtcagagctggaagaggaaaggaccggcagaggcccaggaagacctcctgactgggaacctcacagggctgaagcccctccaggacccatgggcacacacagcccctgctccccacagctgccccaaggccaccaggtggcaccttcctggaggggcctcttggggtcaccacacacactggccaacctaaaggcctcaagcttcccaccactggatcgcagcagctccatggactgcctggcagagacctccacttactctccaccccggagcaggaacctctctggagaacccaggacccgtcaaggctcccctgagctcttaggtagaggggagctcaggacacctctattcctgcccaagggtagtggccccccaagcatctagcctctacagctacttcagcgcctggcctccagtgtcggcagcagacatgcccagacaaccgcctggagtcatcttgctcccttgggcatcctctcccatctgtccatctgtccatctatccatgcagcttctgctcagccccatctgttctatttctccacatatgcagttacctgtgcctttttctagaccttttgttgcttgagaaaaaaaaaaagaaacaaaacaaatcacacacatccataaacaaaacaaaacaaaacaaaacgcatccctgaggagctgaaggctgtgagtgtgctctggggacaaggctggaggagggaatctcacctccaccaccaccatgtgccacatgggcagctgtccccacctcaaggtccaggagagggtctgtggcactgagagagaagaagaaaaggggagaaaaactgtaattaaattcaaaggcaagcactcctacagtcagatgcccaccatccccactgaaagacgcacagctcgtagccgcccttctctgccatcagagggacacaaatacaggcaggaaccaatctaccactccccaccctacccgaccaaggacattatcttttatcctttttttttttttcaagagtaggaaccaaaaagaaaaactactttctagcatctcagcagcacagactagcagcaggaaagagaagaattctgtagtatgaactgtggctctcacttctcccttccacaccccacctcccctcccctcaccccaccccatcccccaggctcataaaggagcccgggttgcccatctcctttctcctatacactataggtctctgcctcccaggcctggccaaaggctggctcctctatgattagaaatacctgcaggatgaagggaccaaggccggactagggatggtcctagtctgggcctgttttgagcctggggtttggattggttcacctctgtccctgaggaacaacatgtcacatttccttcatggctggattaacgtatgtgtgtgtgtatatagatacacagagagaaaccaaagatggtgtttggtacttt

SEQ ID NO: 904 - protein, 2343 aa, Mus musculus
SLVKVMDPDQSIKGTKKADGSPRKRLTKGEAIQTSVSSSAPYPGSGTTAPSESATQELLATQPFSGPSQEKTGQQQKPARRPSIEASVHQLPQHPLTPAFMSPGKPEHLLEGSTWQLVDPMRPGPSGSFVAPGLHPQSQLLPSHASILPPEELPGIPKVFVPRPSQVSLKPAEEAHKKERKPQKPGKYICQYCSRPCAKPSVLQKHIRSHTGERPYPCGPCGFSFKTKSNLYKHRKSHAHRIKAGLASGSSSEMYPPGLEMERIPGEEFEEPTEGESTDSEEETGAASGPSTDVLPKPKHPLLSSSKSGSHGSSQERCSLSQSSTGPSLEDPAPFAEASSEHPLSHKPEDTHTIKQKLALRLSKKLIEEQTFLSPGSKGSTESGYFSRSESAEQQVSPPNTNAKSYAEIIFGKCGRIGQRTSMLASTSTQPLLPLSSEDKPSLVPLSVPRTQVIEHITKLITINEAVVDTSEIDSVKPRRSSLTRRSSVESPKSSLYRDSLSSHGEKTKQEQSLLSLQHPPSSTHPVPLLRSHSMPSAACTISTHHHTFRGSYSFDDHVADPEVPSRNTPVFTSHPRMLKRQPAIELPLGGEYSSEEPGPSSKDPTSKPSDEPEPKESDLTKKTKKGFKTKGANYECTICGARYKKRDNYEAHKKYYCSELQITKAHSVGAHEVEKTQAEPEPWSQMMHYKLGATLELTPLRKRRKEKSLGDEEEPPAFGSPGPSETAHNRPLGSTKSPAEASKSAPSLEGPTSFQPRTPKPGAGSEPGKERRTMSKEISVIQHTSSFEKSDPPEQPSGLEEDKPPAQFSSPPPAPHGRSAHSLQPRLVRQPNIQVPEILVTEEPDRPDTEPEPPPKEPEKTEEFQWPQRSQTLAQLPAEKLPPKKKRLRLAEMAQSSGESSFESSVPLSRSPSQESSISLSGSSRSASFDREDHGKAEAPGPFSDTRSKTLGSHMLTVPSHHPHAREMRRSASEQSPNVPHSSHMTETRSKSFDYGSLSPTGPSLAVPAAPPPPAAPPERRKCFLVRQASLNRPPEAELEAVPKGKQESSEEPAASKPSTKSSVPQISVGTTQGGPSGGKSQMQDRPPLGSSPPYTEALQVFQPLGTQLPPPASLFSLQQLLPQEQEQSSEFFPTQAMAGLLSSPYSMPPLPPSLFQAPPLPLQPTVLHPSQLHLPQLLPHAADIPFQQPPSFLPMPCPAPSTLSGYFLPLQSQFALQLPGEIESHLPPVKTSLPPLATGPPGPSSSTEYSSDIQLPPVTPQATSPAPTSAPPLALPACPDAMVSLVVPVRIQTHMPSYGSAMYTTLSQILVTQSPGSPASTALTKYEEPSSKSMTVCEADVYEAEPGPSSISKEQNRGYQTPYLRVPERKGTSLSSEGILSLEGCSSTASGSKRVLSPAGSLELTMQQQKRVKEEEASKADEKLELVSTCSVVLTSTEDRKKTEKPHVGGQGRSRREAETLSSLSSDVSDPKELSPLSHSTLSHGTAPGSEALKEYAQPSSKAHRRGLPPMSVKKEDPKEQTDLPPLAPPSSLPLSDTSPKPAKLQEGTDSKKVLQFPSLHTTTNVSWCYLNYIKPNHIQHADRRSSVYAGWCISLYNPNLPGVSTKAALSLLRSKQKVSKETYTMATAPHPEAGRLVPSNSRKPRMTEVHLPSLVSPESQKDPARVEKEEKQGKAEEGTPTSKRGEPARVKIFEGGYKSNEEYIYVRGRGRGRYVCEECGIRCKKPSMLKKHIRTHTDVRPYVCKHCHFAFKTKGNLTKHMKSKAHSKKCQETGVLEELEAEEGTSDDLHQDSEGQEGAEAVEEHQFSDLEDSDSDSDLDEDEEEEEEEEESQDELSGPCSEAAPPCLPPTLQENSSPVEGPQAPDSTSDEVPQGSSISEATHLTASSCSTPSRGTQGLPRLGLAPLEKDMSSAPSPKATSPRRPWSPSKEAGSRPSLTRKHSLTKNDSSPQQCSPAREAQASVTSTPGPQMGPGRDLGPHLCGSPRLELSCLTPYPIGREAPAGLERATDTGTPRYSPTRRWSLGQAESPPQTVLPGKWAGPCSPSADKSGLGLGPVPRALLQPVPLPHTLLSRSPETCTSAWRKTESRSPSAGPAPLFPRPFSAPHDFHGHLPSRSEENLFSHLPLHSQLLSRAPCPLIPIGGIQMVQARPGAQPTVLPGPCAAWVSGFSGGGSDLTGAREAQERSRWSPTESPSASVSPVAKVSKFTLSSELEEERTGRGPGRPPDWEPHRAEAPPGPMGTHSPCSPQLPQGHQVAPSWRGLLGSPHTLANLKASSFPPLDRSSSMDCLAETSTYSPPRSRNLSGEPRTRQGSPELLGRGELRTPLFLPKGSGPPSI

SEQ ID NO: 905 - DNA, 138808 bp, Homo sapiens
  misc_feature (1)...(138808): n = A,T,C or G
tgccagagtccaaagcccccctgcctccctgccagcccttggaaaacagctgttatgacccagtgaggctggcccctgccaggcatccaggatttttctttaaccctttgtcagctgcagtgatgccaacccccagtgcccagaccggatgcggcccctaccagctgctggcaaaggccttgctttgatgtgttggtggagagtggagagcaagggccctccctcctcatgattttgggtggggccagcagaggagctggccctggtccttcctgccctgggtgggtgccaccttgcagatgggcccctctacccctagtagccccctccctgttcaactgttttctaaaaagaagacacttttatatcagtttctcaatttttattatggtaaaatacacataacataatttaccatcttaatcatttttaaatgtacagtttagtgttattaaatacattcaaaaagttatgcacccatcaccaccatccatctcttcttttctctttctttctttcttccttttcttccttacttccttcctttctttcttttctttctttctctctctctccctttctttctttcctttttctttctttctctctctctccctttctttctttctttccttttcctttctttctctctccttccttccttcctctttctttctttctttctttctttctctctctttctttatttctctgtctctctctttctttctttctcttctttctttgtataaacttaaggggtacaaatgcaattttgttacatggatatattacatagcggtgaagtgtgggtttttagtacaaccgtcacccaaataatgtacattgtatgcagtaagtgatttctcatcccttacccttcccactctcccaacttcagagcctccagcgtctattattccacacttcgtgtccatgtgtacacattatttagattccacttataagtgagaatatgcagtatttgattttctgtttcttagttgtttcacttaagatattggcctcttaactgttttcatcttgtaaaactgaagttctgtgcttattaaacactgaccccccattctgctctgccccagttccggacaacccctattctaccttctgtctctatacttttatatcattttcaaattacaaaagtgatacatgcttagtgcttaaaaaaagaacagtatggaaatgtagaaacaagaacgcatgtttcaagccccacccattctgcagtgccctccaggacaagattgcatcccccaggtcctttccatccgtcacagctacacagatagatgtgtgtctgtgattttgcttttcaccatcccgttgagaggaagtgtgtgtcacagctgagagtgcagtctccagagtctaacagaccaaggttcaccgcttggtcaggccttagcctctgtaggcctcagatggaaaatgggggcagaagtggcaccttccacccggcagactgttgagggaggggggcagggagactacctgtgagaagcgctgaagcttgtacgtcacatagacaaagcttgatacatagacaaagccacaatgaatctctgttattggtaggagtatatgtttatctttaagaaaagttatgttcccatgactattccattgtgtgtatttatcatcatttacttattaaaccaatttcctgctgatggtcattaaggctgcatccatcctcactgttaaaatagtgctacagtgatcatccctatgtgtgcatgtgtgtgtatgtttgtgtatgatgatgtgtgtgcacactgcaaagctgccgagtcaacatacattttggtagacacggttaaaagattctcctcatctatacctactagcagtatttgagaagtatttgatgacgactcctccctccaccacttgatggtagcaatcactttcctctttgctaaccaaatgggaaaaggtgataccgattttttttttttttttttttttgagatggagtttctctcttgttgcccaggctggagtgcaatggcacaatctcggctcactgcaacctctgcctcccggtttcaagcgattctcctgcctcagcctcccaagtagctgggattacaggcatgtgccaccatgctgggctaatttttgtatttttagtagagacggggtttcaccatgttggacaggctggttttgaactcctgacctcaagtgatccacatttttaaatatattctttattaacgaggccagcattttgcatatatttattagacatttttatttcttaagcaatgatctgttcattttctttctccattttattggctatatgtcttactgttttgtggatgcttattacatattatggatattgacactttttcatatatgttgcaaatatttttatccaatctgtcatttgctttttaactgttgattaactggggttttttgttttatgtaatgcttaatatttttatgtagttagatttattaatcttttccattaagagcactgaggtccaattcgggctttgaaagttattttccaacactaaagtatagaaatattttaatagttctggtattttcatgaacttgcttttataggatgtttatatctctaatccatatacatttctgtgtgtctatggtgcgtgtattctatttaaaatggcattctccacccttcctcattctgtacccattttgctgcttaattttcattgtaacacctgccactatttgccatgtggtttgttttacctgcggatttgtttgttactcatctcccctcaccagactctcagctccataagggcatagaccttttctgttttgttcactgctgaattcccagtgcccagaacaatgcccagcacatagtaggttcttaataaatatttgttgaatgaataaacagccagccagttgtcctagtgcttttatttaaataatccattctttctctgctaatctggaattccatcttcgacagccttctcttctatagtttcttctatagttattagagtctacctaggttttctccctcttcttcagttttacaatttatacttttctagaaaatcaccaacttgtaaattcattgacacagttatgtatcaaattctctttgatttttcaaaatgttcacgtatatgtttacatcacctttcttaatgattatttgcgactttgcctattactgctagtcagatttgccaccgatttgtccattttgttggtcttctcagaaagcttagcttgcagctatgtatgtatatatacatacgtatgtatatgtatgtatatatacatacgtatgtatatgtatgtatatatacatacgtatgtatatgtatgtatatatacatacgtatgtatatgtatgtatatatacatacatatacgtgcatatatgtatatatgcagctatatatgtatatatgtgtgtgtatatatatatatagttgtggttgctgtcattttctcactcgttttattttcaactttattcatttcttctagattactttggtttatttcattcttttttagtttcttgggttatgtgcttaactcatttagtttcaacctttcttaatttatcatgaaaacatctaagctttgtattttcttctagatgcagctttgattgcactactcagattttgaaaagtagggttctcaatgttgtacatttataattatcctacgatagcgttgctgtcctctttgattcaagagtttttttagaaaagcatttttaaattgtcatgtgcatcatttgtttatgtatttttattttttgctatttgttaatgtctaattttatttcatcaagaactgaggctgtggtccgtacaattcgtgcattttggaatttgagattttcttgcagtctagtacagggacatttgagaaaaaggtgttttctctatttcttgaatgtatatgaagttaaacttactaactacatcttcaaaccctttgtattcttctttggaggttacttataccaccaaatttcaaataataatgctcaagacatttcctgttctttctttacctcctccttgtgattccaagaatgtcttattttatacattttgtggttctgtgtttatgatgagagtaaaagttcgtgatttttgtatctccttggagaaatagactcttcggcaatataaaaggccccagtttagtgtatttaattaacatttttgcattttgtctgatattaatattggctttctcgcattattttcgttaccatttgcttttttccatttatttgatttccatcttttttgtcagtttgttttaagtgtgttatttccaaacagcatatagctggatttttttttccttttatccagcctggtctcttaacttaaagtaatttaatttattcatattattgtgtcttttgtcatcttattttatgtcttttgtttattacactttttctttcctgtttaatttttcttttcccactcttggctaaattaatagagttttctttgtttctcccttcccctctccccacacagtggtttaaaaggtttgcatcttgcttttcttctagaaatggttagtttttacacagatttctctattgatgtcaagaattaaatggtatctaattcccaacaagataggatcatgattatcaacatttgtttagacttcacttcacctttttctgcttttattatttctccctgtttcttggatatcctatattgtccttttttgaattacttattctggtacaattcttatttcctttgagtgattcctcgagtaattttttttttttttaagaaaagatgcgtgggtggtgggtgtcacactattttatacttctctctggctttgagacttggctgagtaacggatctaagggttttaaccctttttcctccaagctcggaggtctgccctgttgtaaatgatgcagataccaaattgaatgtcaatttgattccaagcatttttgtagagactgtcaaatgccagctccccagatatcatctacaaacttgttggtaaggcaaagctgagtttattactcacttgccgaagggagggcgctgattccagagggctttggcctgtctgggaggaaggaggcaaggttgggttttctgaagcctagcagttctctttaaggtgggtgtgtcaatgtgggggcttggttagggttgtgtaaggaacacagtagtccaggactggtggaagccatgaggtgagggattttgaggccaggcaagggattcagagaatcgtagggcaccagctgttgattgaagagtagatgggtccttcaggaggtttctgtgatgaacagtgaagccatttgccagggagagaggctcctgggataataaagtcatgcagttgaaggcagaaaggtgtgtggggaggtactttctgctcccagtacctccctgcccaactctcactttggtcattttggaaactgagaggatccactctttttgggggggatttcaggaccccactccagcccgccctgccatggaggagctctgagcaagtcctggggtgcctggcaggtgggccctcactgcccggctgggtgaggctagcttcgctctgattagatttcctgtcactccctctcgtctgttttccctcggactttctggccagctgatgctactgcagatctgttcttatttgcacatttctccttttatttgaggggtgttgcgggggggagaagagggagataaatgggctcggtttgccatctaggccctcaggtgtgtgtgaccttttctggtgacctggacacgggtgtggtgggcagccctctgacctgccacggagggggagactggggacagtcagtgacaccagcctcacgaccgcagccagaagaagtctctctccttccacctgatcctttctcctcaagccacacccctcaccctggctgcaggacctcactgatgaaaatgacctcacttcacagcaccaccacatccaggccacttcatctgtcaaaccgtcatgtcccggcccctacacagcacctcccactgtcgctgcccctcacctccagccatgtggacaccatgcaattttcttgaacattctggccatttgggggtcctctgtcctttctttttatcttttttttattcttttttttttctttgagttggagtcttgctgtgtcacccaggctggagtgcagtggcacaatcttggctcactgcaacctctgtctcttgggttcaagcaattctcctgccttaccctcccaagtacctgagactgcaggcatgtgccaccacgcctggctaatttttgtattttcagtagagacagggtttcaccatgttggccaggatggtctcgatctcttgaacccgtgatccgccaggcgtggtggctcatgcctgtaatcccagcactttgggaggccttgacaggtggatcacgaggtcaagagatctgtcttttcttacatgactccctttgttttaaatatcctctttcttttttctctctcttacacattcagacaccatcaaaattgactacccctactccgtgctccccttgaagatagagattaaatctttgccatctattaacgctggcacctacaacccggctctacccaaaataggcactgagtggacatctgttaaatgaataaacaaccaacttgggcgctaaagagaattgttccacactgactgtgtgtgacaggccatactcggggtgagggagtgagtcagaatgaccctgcctgagttgtatgcaatctagaagggctttaagccgtggctgagcacagtggatgctgttatttaccttaggaggagcacagcaaatgtgcttggggtattctggagaggcagaacttaggtccagttttatgggagctagctgaacctcctgagggaagatgggcaggattcagcaaggtgggcacgattgcagagggaggtgagtagcatcccatgcagaagaggctgcctgagccaaggctcagaggtaggaaactgtagattgtgtttgtagaatagcgtgttctgagaagtgagtgtttctacactgggaggaagagagcacggccattttgattaataactgcaatctattggagggcatgaggtcagatcagggaggatagaaacccacagagtagtgagaaattgggctggttcggacggcagaatcaggaactgattgatagagccacagagcaagcctctccactgtgtggtgctgcgatgctgccctgggggtaggagggggctggctgggtttcatagcagcaggtacattgggaaggggacagcaggggggcatcggtgacctgtatgctctgtaggaatcagcagtgcgatatggttgccaaacgtgattctgaggctgtgtgaataaaaagcagggtgcccaagaggagaaaggtaacagtgccccaggcctgtgtgcgggttactccagacccagattattgggttccactctgagataatattcagagcagttacgtgggccgtgccaggcattgttccaacctttttccatgtacggactcattaaagtacgggccctggaaggcactcaccattcttagccccacttgccaggcacagcaaggcaatgcaactttctcaagttgcagacgtcagaagtggaagggctagatttgaaccaggtatacctggccctggaagccacattctcatccatcccacgacactgcctgcagcgggcaaaccagagcatcctccaaagagcacggcgtggatatgacacgccacgccaccactgactgaaacaacttcggctttctagtttacaaagcatcttcctctatatttccttatttgatccttacaacagcctggcaagtcagttattaaaaaccaatactcatttgtgtattcattcaggaatcactgttgagctcctgccctgaaacaggcctctcttggcctgttttattttgtgatttggggaatacaatatgcttttatgtctattactgtatttcattgccacccatgcctgaatatgagtcagttttccaggctgtattagttttctcttgctgcataacaaatctcctccaatttagtgacttagaataacacccatttgttagctcacgggtctgtagggcagaagtctggtacagagtggctggattctctgctcagggctgaatcaaggtgttggtgggctgggttctcatctggaagctctggggaacattctgctttccaagctcattcaaggtgttgacaagactcagttccctacaatggtaggactgaggtcctgttttttgctggtcatcagccggggttgctgtcagctcctggaagctgcgggccaatcctttccatacaaccctccatcttcaaggcggtgagggtatgatgaagctttctccagaccctaatctctctgacttcctctcctgtgattagccagagaaaactctgctttttaaaaataatttcaacttttctattagatttggggtacatgtgcaggtttgggtatattatgtgatgctgaggtttggagtagaatgatcctgtcacccaggtagtgagcatagtacgcactaggtagtttttcagcccttgtccctccctctctctcccccacccagtagttactagtgtctgtcgttcccatctttatgtccatgtgtacccaatgtttagctcctgcttataggtgaaaacacatggcatttgattttctgtgcctgtgttaattctcttaggataatggcctccaggtgcatccatgatgctgtcaaggacatgattttgttcttttttatgactacataatattccatggtgtatatgcatcacattttctttacctcatccaccactcatgggcatgtaggttgattccatgtctttgctattgtgaatagtgctggagtgaacatacaaatgcgtgtgtctttttggcagaataacttattttcctttggttatatactcagtaatggaatttctgggtcgaatggtcgttctgtttgaagttctttgagaaatttccaaactgctttccacagtggctgagctaccttacattgctgccaaccgcgtataagcattcccttctctccacggtctcgccagcatctgttgtttttttgcctttttagtaatagacattctgactggtgtgagatggcatttcattgtggttttgatttgcatttctctgatgattagtgacgttgagcatttttttcatgtttggtggccacttgtatgtcttgttttgagaagtgtctattcgtgtcctttgcctactttttaatgggattatttggtttttgcttgttgaattgtttaagttccttatagattctgaatattagatcttcgttggatgcacagtttgtagacattttctcccattctgtaggttgtctatttactctattgatagtttcttttgctgtgcagacgctctttagtttaattaggcctacttgccaatttttgtttttgttgcaattgcttttgagcacttagccataaatacttttcccaaggctggtgaccagaatggcatttcctgcaaattctgtttttaaagggctttcataccaggccaggtcttgataatccccctctcttaaggtcagttgtgccctgtaacataacccaaccatccatcctattcacagtcctgggggctttgcagggtctgtgcaccaggggaaccggaaatcttgagggccatcttagaattctgcctaccacactagtgaagaaatagaggctcagagaagttaagtgttggatgcaaagtagggggatgtggggatcaggccctgtaccaagtaaagctgcttgggagtagttggggggtgtgtcctccagggaccaggcagggattgttctgtgtctaaaaaagttgaccaagaaagttctttgaccatgtttctcaatcatctcctgcaggattcgaggcacaaacccagcagcctcaacctagttcatggaggagcctcgcggggtcctggccaagcaagcccgcccctctggtgggaagagcggcgcctaggtggagggtggctgccgcaggagtggacatgaatgctggctttcagagagaacagcgtttcagttttggtcatcggaagtggtgccttcagcacaggtaggaaatgggggctgttgctgaatatgcttgccaggcgccatgttggtctgtcttgcatgagcttgcttagttcttcctctgaaaaatgtattattgttattattagtgttatcgttgcctttctggtgcctctgtgaaagttgttgtgaaagtcctcaaccttccttggtcaggagtagagaccttgagtgccagcaactggctactgcttcccatgctgtctcccatgaaatgcagtccgccccctcccagtacctcagtttccattctgtcctggcaaaggacacaacagctcctctcaaagggccacagccccctctccaggggccacagcctccacaagccagtccaactgtgtgctcctgatagccagaggtctaccctcttctcctacataatggttcttgctgaagaccaccactgcccacccaatgcctagtcagaggagcaccacgggagttagagacatagcagcaggtcttcagtcccctttctcaccccacctgcccccaagttgtgaagaattgaaaagatgtcagggttggggcaatgattcttggaatttcagcaatttcaatagcagggccccagctcccgaaatagtgatcaaatgagcctggggagaggcctggtatcagcttatgtttatatatgcatttagatcttcaggtatgtgctgtggtttctggctagatgttcaggcttcagtacaggttaggtgtgcagtgttagaagcttgttgggtcaagaacaagtccttggatgttttctctggtgtggagagccagaatcacccagagagctggggattagaaagagggtgcctggtatgacaaaggaaggaaggaagggagggagggagggatggacggagggagggagttctctggcctacctgtgccctctgcatcagactcttgggggttggggacccaggaatctacattgattctgatgcagccaaggcttggggactccagggcctccttctgggggcctgtgtttgggtctgtgggcccagctgagatttccaaggcaacatttcccagcctggcatgccaggagcagtgactctttcgcttctctgaaagctgaagtttcctcactgtatagagaaggggatggggccacaggcagccctcagagatggcatcgctgttgctgcctggacttcggggtggctagagcctgtgtctctgcccacagtatgacagcttgggcctaccagccctaggcctagaccagggttctcctgaggaggtaaaggaatcgttccctggattccaaggaagaactgggcattggagcctcattttaagaggggatgtttgttgtggtacttaacagtgtagacccaccctgagttcaaatcccagccccgactcttagtggttgtgtgaggcacttactggtttaagaggcaaattgctccaactctgcctcatccttctcacttgcaaaatgaggctggtagtgatacctgcctcgcagggttgctggggaaggcccctagaatgttgccagccacgttaacaaggacctcccaaacgtgagtcacccttctggcgtgtgtgggcagttgggccaccaccctgctctcccagttgcagccctgtgccatctgcatgccctgccctctggccccagtgctgtgtccctgaggtcaggctgaagcacggggaccgatgctgctgcccacatggttggtactttacagacaggttcgagtccttcccaaacctcagtgagtctggtcctgttgcccctgttgtgcacataaggaaactgagcacagagaggttcagtagtttaaagacagctacacagatggtaaggggcagagcctctggttacaaaagacccagcacttttttctccaccaagatgcttcctgaagaagagcaatgacagctccaaggatgaccccttccccaggaatgtccacatgttcataggaatcgatcatgctgtaatgccccagcatgcccctggctcggcatcctggggcacttcctggtacctcaacttagcacttgtttccttctgtgcctatcacagccatttaggggtctcatgagcagtctcaggacaggatctgggttcattccatgaggtgtacaacagatacttgaactagtccagaagcagagccctctgagagatgcaagccagatacatgggggaactgtccagggagtacagatggggggtcctctgcagacttggcatttccctcccctccccccgcttcgtgcccagactctttgtttgtccgtgtgggctcagccagctgcttggaagaatctgtagagtatgggacttgcccagagggaaatgagctgtcagttccagcgagaaacctggctcctgcctctgcctgtgttctccctggggaagaaagtgcctgtgattaatgaggtgctgacttggtgctgctggagtccaggtgatcacggccactgctggcacggccctcccagccaccagggaggagctgggatatatggcatccgaacaagacagaggtgtgcagtgctgcaaacgccccggtgctggggagggcggggtggcccatcagcaccatcagaggcttgggcacagctatgtgtggaattactgagggcagggaaacatggagtcacagccgctcttcagaaggggcctgaagtggggctttctccagaataaatgtgctttctgaatgagaagctagaggacagatctcatttgaaaatggatatggaagcaatttctcagcaatgagaaacttgagcagttttcaaacttttatagtcttagaagctatttttaaaagccaaatcttgcatggaatgtcaatatataaaacaggttaaaatgatggtttatgaatacattattttttaagttcaaatttttaacattgtttaaaaattctcatttttattcttatttcttatctccaaattattgccatttagacttagtctaatttaagtcagatgcaaaagactttatttatttatttttgatatatactgtcttgctctgttgcccaggctagagtatagtggtgtgatcatagctcactgcagcctcaaactcctgggctcaagggatcctcctatctcagcttcctgagtagctaggagtacaggcatggaccaccacacctggctgtctagtttttgacatttatttattatttattatgaacgttatatttattatgttattagcgacacctctgttttgatgcacaaacacattgaaatctgaggttctagatcaggaattggcaaacttgcctgtgggcctaatccaggctgctgcctgattcggtaaagttttattggaacatagccacaccgttttttaaatgcattatctatggctgcttgagactgtctgtttcacaaaatctaaagttcttactatttggccctttacagaagaagtttgctgacctctgccctagatcatcattgtattgcttgctttatcagctgcaatatctaatattcctttttctttcttgtttcgtttggcttgactgcaaagtattaaggaattcttttttttttttttttttttttttttttttgagttggaatctcgctctgtcagccaggctggagtgcaatggcatgatcttggctcactgcaatctctgcctcccaggttcaagctattttcctgcctcagcctcccaaatagctgggcttacaggcgcatgccaccacaccagctaatttttgtatttttattagagatggggtttcaccatgtcagccaggctggtctcaaactcctgaccttgtgatccatccacctcggcctcccaaagtgctgggattacaggcgtgagccaccgcgcctggccaaggaattctaaatcaacatccataacatgatgtgaatggtgacagattgttaacagcttgccttaaagccacagaatggtcttcagttcaacattatctgggcatttggggaggagtagaagggaattctggtttgcatcagtgacaatatccaacaactgcttgaattccttcctattacacacataagtcagacaggaagccccacaatcatttatgatattttcatgataatccacataatacattgtcttgtcattgaaagcttcagagtgtacttgcttgtatggttttgtgtacgcatatagagtcctgaatttaaaaaatgacaacacaaagatacccagtgaagagctccactcttcctaactgaagatacatttcaacggtgaaggtcaagatctacccagaccttcatctgaggtctgcacaaaccaaattaaaccggcagcacttgttggctatattcagtgtgttcccatgtgctatagagcatgtttgaatgtgtgtacgtgctcgttttctgttagaataggagtcaaactgtacttttagaataacatgctcgtggaacatttggagagcctctgaaacactttcatggaacacaatttggagactaccccttcagcaaatattggtggttctcatttttgtactggaggataatggaggggccacggatgctgagagttggaggcagaggaggaaggaggagagatggggaggggagaagttgaggtgatgctgtggagagtgcagtcagtagtggaaatagtactcttcgcaacccagggaggccatgtgagcttctgccgaggcttgggatgtctcctagcagttgttgatgggcaaactcagctcctggggctgctttaatgacctctggcccgcgcctttgaagaaaaggtgcagaagagcgtggagcaaggtaaacatgtgtgcagagaagtgggggtggggagcatacacgtcacttctgatcggcatgcagagagcctctgtggccattcaacaggtcaaggtgtgaggcagtggggaggaaaaaggatacccgaggggccaggagaatcagcttgccaaaccagggctggcacaggaggaggagggcctggagcatgggccgtgtttgtgagagaccggcgtggggttggatgtcaggttccctggatggtggtggctgggattgcacattggccttaggcatttgaggcaaagcccacagacccaggaatgaaacccaggagtcctgactcccaggccacctgcccttcactcagtgggtgcaaggaagagagccaggcctggtggtttttggaggccatgggctagagaagcctcaaggggatagaaaaacccctgtgctttctgaggttgtgctgctcaccccatagaaaagggacatttttaggttttaaaaggatgacctcatttttttcttatttacatagccctgtttgtttatatagccctttaaaaatagcaagtgtgtgctaagcttagtgctctctctcccaccaccagtggcagagccactgtgtggggagaaacacctttttatcttggagaggggcagccttgtttctgaggacagatgggagcaaaacgggacaggtaggaagtttcgtggtttctcgtgtcgcttctccaaaatagccacactgctgcctcccacttcctgcctgactcggctggggtagattttctcctttagaggatttgtgttctgtgtattcccagggaggctcgaagggatctgttgccaaaaacatgcttgacactgaagccctggagcttggcactgagggccccagctcaggtttggaccactgggtttgcatccgggctctgtctcatactggctgcgtgaccttgggcaaatgacttcacttctctgtgcctcatcagtaggatggagataacaactctagctatatccagcagttactctgcagattaaatgaatatgtgtaaagggcacagcccagtgtgggcacatagcaactcttaatgaatctcttaataaaaaacagcaatgttgttgttgatctccatcccctacctggaaaactgtaccagcctcccagccaccttccctttcccctggcttgcctgctccagcacatcccagcatgatccgagagtgatagaaacgtgaaacacaaatctgaccctgctatctgctgcttaaaatccacccatagcttccaacgtctatggcaggaatgagcattcttttgctctgaatggccagatagtatttgaagctttgccgggcatatagtctctcttgactttgtcattgcagcctggaagcaaccacagataatatgtaaaaaatgggcgtggttgtgttccagtaaaattttatgtacgaaaacaggcagccggctggatttgccaacccttgacctacaggatgaatccagacccttagctcagcattcccagtccagcctgttcccgttatctccatccttcttcctcccccacccctgctcttgtgcagaacatgtcacactttaatcctttgcgtgtgctgctccctctttctgagttttccttccctgccccctgagtgccccttccccatggcattaggacctttactctgggattctgtggtaccctgtctttatttctaccctggtcatatatgcaagttccatctgtctctccatgagaggggctcccctctaggcagggattcggccttcctcttctgtacacccagcagggtgctgctgtataggtttctgcaggtgctcagtaagcatttgttattgaacccaaggatctgcaagatggatggttggcctcagggagctcacagtcagcttagaaagctaggatatgagccagtcaaaagccagccagcaatccaggcaggaaatgatgatggtctgtgtgtttggccctaactgatgtcaagtggagattctgagcttgatagaggaaggtgaaggcatttgagttggatgttgcagggtgggaaagagacttgcagagatagggaggtcaggaagtctttccaagttggggaagtcataagagaagagcagggctgaccaggcctgggggcttaggcctgtaatcccagctacttgggaggctgaggcaggaggatcacctgagccggagagtttgagactagaatgggcaaggtagtgagacctcatctcaaaaactagaaaaataaaaaatttagccagatgtggtggtcatactcctgtagtcctaaatattgagactgaagcgggtggatggcttgagcccaggagacggaggctgcagtgagctgtgattataccactgcactgcagcctgagggacacagcaagaccctgtctcgaaaaacaaaacaaaacaaaagaagaagaagagcaggctcattgctgagctcagggtggggagtggacagagcagtctggccacggctgcaggccctcccttgggagacagagggggccaatgctggaaagcagggcgaagttttcatcaatgagttgggggtggtgaggaagcttagactttatcctgtgagccagaatttctccatgtgtgtccacataccctcccataacagaattaccttgagtttctttaaaatgcagattccagggctctgtcccatactgggggccaggaggctgaagggggtcaaggccgtggtctgtgggaggaagaggctgcaccatggctatgggtgcaccacaagtattattcagactggtgtcacctgtaggaagccgggtgatgcctttcccagctggactggggacaggtgaggcgggaatgaataatcctcccaaagggcaattgggaacacccaagctcaaacgtggcaagtgacttgcccagggtcacactgtcaattacttgcaggtgtggggctgaccagttatggaacaggcttcctctcccaatctcagggcctcgggtggtcctggaggtgccgcaggtggaagaagaacaggccaaggcaaatgcctccggtacccagcactgcctggtgcacagtagtggttgatcagtaattgttgaaccaatcagggtttctgtttgcttgaaggaaagggtaggagtggagggtgagtgactgggtgaatgggtgctatgaggacaaaggagagtggagtttagaggtagcactagtgtcgcaagcctgaaggtttaccagagacagaggggtgaaaagatgagtggggcactaagcatattgaatgtgagagctgctggaaatgcaggattggggcgtgctgggcggggcaggtgatgtgtgcagctgtggaagctgctaccaagtcaaggtgagcagtgcagagagagaaaagcaggggattagagaccaaagcttgaggactgagtacaggcatctaggaagaaaaagcttggatggaagagtcagagaagtgctcagacaggtgagaggagaggtagggcaggacaggaggatcagaaaagggagatttgaacagccaaatcacctaggccacttagtttgggctgctctttagaataaagccagctatcctaaaagaaactatgtcatgggtaaataaaaatgtcaatcaaactaaaactgaaatcacgagaaaaaatttctgtttgcttgaggtttgtgctcctggccagcgtagctgcaggtgtgggaaagcgagtggaaactggacccacctgtgccacctgtcaggacaagccctgctgtcttgcctctgttcgggctctgtttggcatgcctccctggggtcgtttcagtgctcccaagcctttgtcctcttctcctgtgtctgccttagcacctttccccctttccttccatttcttttattcattcaacagatattcaaaggaactcagctgcagcccccaaacccctgcagagcctgtgagtcacccactagagagcttgaaacatggagatggagattcctagacgtgcaaattcaggatgcctaaaagcagggagtggccagccatgcctaggtgctcactgcagcctaatctgagcagcctctctggggctacctctgcgaatttcctattttggagctgctctaccggggctggttggggttgggggactgaggcccaggtgtctgggtgtttattccatatggctccaaaaatatagcattcggacagcctcccagctgacctccctggagccctggctctccctctgctgagcctacatatgccaccaaactcatcccttcccccactcctaacacccataccagtcaggtgacaccccagccaccatcaccatcctcatccatcctcaaagaggtaggtcatccttaccttcggccctacttagacataaggggccaagcaccattctgggtgacaaagcacaaaacacctgcctcttggagttacattctggtagggaaatagacaaacatattgtcactacacacacatgcacactctctatagactgtatattttgtgagatcttaaaaacataagtgtatgtaaaataaatgtaaatatattatcttcttaagtaacatacatagtatgtgacaaggtggcagtcaggaaaggaatagggggcacggggctggcaggttgtcaaggttttgaaatcaggcagtcaggacgggtggagagtaaagacctgagggaggcgaggagcaagtgctgggggtatcagaaaagagtattccaggcggaggcaagatcagcctgctgggaacagcaaggaagctggtgtggctggaggagtgggggtgggggcacaggagcagaggaggctggaagggagaggcaggcacaacatccagaagccctgggaggcctgagcagaggagtgggctgtcctgccgaaggaggctgtggaggctgccctggagggggcgggggcagcagcccgaggccagctaggaggcagtgacgtgacagatcaggaggtgatagagtcacacaccagggtggcaactgcgggggccatgggaaggggtctgattccagctccattttgaggtcaagccaacatgatttgctgacagatgggacgtgaggtataagagaaagagttctgagaggggagccaggctgacacatctgttcagtcttctctcagactagtcaacttcttcaagcctcagtttcctcatctggaaaatgggccaggtggatagataacttccaaggtcccttttgtcttgggaaactcatccttgagctcaggtcactggggcctggggtggtcagggaaggctttgaacaagtgagtagaactcgggcttaagaaaggacttagaccagacaccaccgaaagggaaagaacgggacaggggcacccaggcaaagggttgcaaggcctatgagtggtgcccgaggatggcaggcagacgctgctgtcagagcactgggcctcggtaggaggctgccaggagccacaaggatgggcacaccagctcctcaacactacgccctttggaataaaccagcaggttcagggcccgagcacattttgcaaacactgaggccctcaattttcagcattttcagatggacatgcttaggcaggaaggaacaaggcttggctcctggcctggggagagttaacctcctggcccggcattgcataaccgcagagtctgctgagcgcaaggagactcttctgtgtggcagccagagtggcaagcctggtggctccgggctctggcaccgtcccgcagcggaacaaacagccctcccttcccagataatggccctcattgagcattgtgtccatggccagcacccagcacagggcagctcagcctgggtaagtttcctctcttggctgcttagcaaaatatttacactacgcctttctagtaagatggttcctaggaaccagcaggcagagagagctggggaaatgcacccaccagtgaccctggtctcagcttagggaaatgctgccacacacccaatgacatgtgagcctggtgcggtcattgccctccagggctcttttgtaaaagaagacactgaactaaaagatgcttagaagcctgtccagttccaaagccattggcatcttctctaattaaagagtgaactccagtttcttatgatgtgggagtagaatttggctggtctttaatatctcacaaagggtctctttctcaggaaggcatgtgtgtgatttgggagaggtgaagatgagaagtctgaatcctacctacttggttctctcccgtgcatcatggatgtcaggaaacactgttgatatctcctgtgcactgtcaatgtccctctctgtgtgtctttgaatggggagcaaggggcataagccagatcaccccaggcggtgccgcactttaagaggtatctggaccagccctcaggagcatgcagcccttgtcagaggaacttttgaagaaactgggtaacagaatacttgagagacagacttgctgtcctcaaccaccccaggggttgtctggagaaaaagggtcagagatgttctgtgtggtcctcgggacagaatcaaaaccagtgagtgaaaatgacatggctcattattaggacgatggcccaaacaataggccccataggtattttaaccaaaaacacacacattgatccatgtttccacttctggaaatccggcctatggaacaatgaatgcatcagtctgtaaagatatgtgtataaaggatgtttatggcaaaattctagtaggaaaacttacaaaaaatatacaaacttaacagtaaatttaaaggtattccatccaaaccatggtccatcattcagctgtaacaagattgagacagatcctgtctctgtttggaaaggcagtacggtagagtggttaggagcacagggtctgaagacagacagccagggttcaaatccggatcccaccacttacaaactgtgttgcttgaccctctggccattcacactcctctttggtaaagtagggattgcaatagtgcctgtcctttaagcttgttaggagcagtaactgagttaattatgtgaggtgcttataactgtgcctggtacaggataactgctcacaacctattggcctgtagcctagaaagactgtccatgaggaaggccgagtgctgaggaatgtacatagggtgataccatttttagaaaaacaaaaattgagcaggtgcagtagcacaagcctgtaatctgagatactcaagatgctgaggcgggaggatcatttgaggccaggaatttgagaccagcctgggcaacatagtgagactccatctcaaaaaaaaaaaaaaaaaggctccccatcttccccacttcctataccctgtttgaaaaaaaaaaaaaaaagtaattgctattgcctcaggcagtgagtggcctcctgagagcagcctctaaggaaggctggagtctcaaatgggagcttgggtcagtgtccttggcagtcccttcaacccggagactctgagactctgtgcgtccctcttagaaatctcaaagtacatcctaccctgcctttaactgaacgggatagtctgctgtttgcaaaaatatacatgccaagacacgtcctttgtgcaggtggggaacaaagatgttggctgggggcttaattctacagcactgcccattgccctgctgtggcattcatcagtggagcccacatggttccacttggggtgctctaagtttcctcctagacccatgggtttgtatgagccatgccaaccatgacaccatgacctgtctgaaatggactccaccttggtcaggtacaatgatgctcagatccacccaccacatgtcacaggctttgggagtggagggagaggtgacagaagctccccacctggggcatgtctcttgtggaaatcagtcatttcttctcccctttggttaaaccacttgagatgcggtagagagtgtcatcttagcagagagaaaacacacttgttaaaggagtcttggagttattaatatatttaacaaatataaaatattttcaaaatatttcatccaagcagcaatattatgcatgataatataacactagtgaactcaccaccctgctaaaaaaaaaaaaaaaaaaaaaaaaaaaaaagacttgtcaaatacagtggaagccctgcatcgcttccacaatgtgggtccctttctcctgtgctcccaggagtgaccgtcatcctgaactcgggattaccatcccatgattgttttctgggtttaccctgcccccaccgggcttgccctgagttgggtgaggccctgtgcctctctgcccacagtcttttcctgttagactcttttggtgagtttcagcctttggttacatctaaatgtccaccggccctgccactgtttctgggcagtcttggtgcctgtcctgtcactggccttgtggtcttgcgcgaatcccttctcttccttgggcccagcatcttcacctgtcaaacgtggactttagaccccacttaagcgccctctagctctaagcttgcgtggtgtgatggggaagccaggctgagggttctccaggtggaggagatggggggcagccccagtgcatcccaaggtgagggacgggccgatttcccaagttcaggacataaaccatgagtagaagatgagctgattttgggagaacatgctggaagttctttaattgactggtaaaattatttatttaattcagtaaaaaatactagttggcagtttctcctgtggtccctattgcttaggaagaagtaacctttaaacaagtccaattcaagtcaaagtaaattaaactattacataaatagcaatacaatacgatggcattatttctgagaaaacttgtaacggtggtcaccaaatggcacaacgtttcccaaacaggagctaatgacttaaagggtggggcccacctggccttctgagatgctgggagagccaattgcctagctcagagctggatgtcagagccccggaagtattgggaggatgacttcatggagggctccctacttaaaacagcatggaagaaatttccttcagatcttagtgccaagaagagctttgttttttctgaggaactggccagcgtatcatcagaacacggagactgtgcagctaactgtgttgcccttcttcctctgactgctgtatactaaatccatggccccaagagagctaccatgtggggccttctaagtgacttacccatcttcttccatcccttctggtctttcatttcccctgggttgatttttcattttaaatttgtgttcctattttgtttttgtaaattacctcaaatctactgtggaataaatcaagttaaaattgcaaaaagacaaaaaggggattaactaatgagttaatctatctgtgcacaaactgtacatgaccaaagcatgcttggctctgctcagcctgttgggacttcctacgaggaactgaagccctgcagaaaggaggcttgccttaggcagaaagggtggcaaagcagttgggatggccactgcctgttttccacccctagaatggaaccatctaagcccttgggacttgcaccctctgttgagctttgagatcatctcagaaatggtactctccctgcagactcagagcctttagactcagggctggtggcccttgacacgcctctctcaccaccagataattatattttcaggcagctgttccttggggaggaatattgagtgccgtcccatgtgccatctgtttctgaccattctgattctgctgctgacctcagactgcccatgttgtggctacctctcccatctgagtccctgcactgcccagtcacagacatctgctgccggacgccacactgccctgatggctcagagcggccagctccaacctgcgtgatctcacaggcattgtggcctgggcgtcagggtgctgtgagaaacaccaggaaacactgatatttttagtgcaaatgatgaaaaacgttatgctaagtgaaagaagccagacacaaaaggacatatggcgggtgattccatttttatgaaatgtccagataaggcaaatttatagagatggaaactagatgaattagtggctgccaggggctggagggaagggaatgtggagtgattgctaatgggtacaggatttcttttcagagtgatacatgtgttctggaattacatcattgggatggttgcacaaccctgtgaattttatggtatgtgaattgtatctcaatatttgaataatcaaatgactagacagcatttaaagagttatgtttatgagaaagatactcaaagtttacacaattctactcattagcaaattaatacaccccttttttcagaaggaattaaagtgacttcctcaaactattaactgaagctttccacaattttaactttgttcattcatttatttatttattcactcacaaatacccatgagtgcctactatgtggcaggcacagagaacatgaaggtgtttaaaatacagcccctgctctccaaaatgtgtagctggggagatgggcatgtgaaaagattagtaccgtgagggaatacaatataaaatgtcacgagacccgccccacgcgttccaaagtaagcagtcaagaattgacaactgtcattgcctctggagaggggagctgtgagtggcctgggctggaaggcaggggtgtgttcctgttctggaaagaaatcattcactcaggccaaagcctattgggaaacccatttggagaggacgcagcttgtcagaagggtttggagctcttgggaatggagggagtgtccctgcaggcagtgagcccctagcggctgactccgcgcccagtgctcctggctgtcctccactgctccctgcccagggaatcctctgccctgtccaggtcccttggagcttccttgggcgcttcctggaaggaggtgctgcattcaccctgccagggccaggttgggacaatgagaggcagagactgccccatttctgtgtggcaaacaagaaacatggtttatcggttcttctgaggcttcagttgtacctcagaccctaaagggcccagctctgcccatctcttccatgcaaagatgaagggaggggacaggggctggcactgtggtaccctgaaggaggcacttaggacggtgatgattctaggccctgatgaattcattttttaagccagcaaaccctcctggtcccctgagttcaggataccgtatttgtccaagcaaaggatagctcaggaatacagaaatgagtctgatcctaggcaggactcagggaacaccatgaatccttgagaaccatgggacggagaatcagagtcctgagctgtggatccagcccagccactttccacctctctgaacctctgtttcctcatctgcaaaacgaagtgataagccccttcccagagggctgttttgaggaaattcttagttatgaagtatgttagacattgtgtttgcagtcttagggggcagttggagccatgaacaggaggtctgcaaggaggaacttgggtgaaattaaatgagacagtggctacaggggcctttggtgagctgtagtcactgcactaacgtaaggcggcattgttgggattatgatccatctgaaacaggggtgtaaacaccggccaggggaaggcagaatgggttctgtctgagatggaaagaggtcccagggagaaactggcagtggtgacaagaaggatttggctgaacaaagaagggaagatgggggaccgggcagcaggccaagggaggggcttgaaccctggcaggaggcagaaagggtgagaggagctggggcacaggtgggtgggagtgggaggaggaaggtggggaggcgggaggagtggaggtgggatcacagggtggaatagccagactgccaggcaggaaggtgaggtgaggttgggtcctgtagaaaaagcctgggccatcaagaagggcgagtttatatcttcacagacctagtcaggaggttcatctggggccagaatcaggtgctctggggtgagccgacctcaggcaaccggagttcccaggctagggagaagcatccagaatgtcagggcgggaaaggtccccgaaacccaactctagtgaataccatatttttccgatatggaatcaggcagcacaatctcacagaggacttgcctggttgcccaggacagtgggagaaagccaggtgggtctctagatccccaggcctgaacaacattcgagttttcccttgcttccttgattaaaggctgctagagccacatgtggaggtgaaatggggaagtggttgagacacacactgcagaccccctgcctgccttggcttgcagtctcactctttgttgaatgtgtgcccctgggcgcatgatggaaccttcggtgcctttgtgtcctcatctgtgagatggatgtaaaaacattgccggcctgataggctcgttctgaggactgaggacatgtcaggttctcggcagagagcctggcacatggcgctctgtccccatcagcatttcttatgattgattatcccagttgctccacagtttgtgtctttgttacgagatggaatttgccttccttaaaccacctttggtttaaggaagtccctttgcccgtgtatagcttatcttctggctcttctcctgtttcctcaattaaatgttcttgacttgagcctgggttacgttatcatccattcaacttagcgtttgtttattcatccattcactcattcatttgctcataattccctggacaacccgtgacctttgtttagaacaggagtgtaacatacactagtaattttctcaaagggtcacccttctgcccccacaccctgagcctacggccttctttctcacagtgtgggattttcagagttcacctggttgaatggaagaaagcctgtatgaactgcaagagcttattttttggaaatgcagccccacgaaatcatacttgacaacatcgtcttgttcagggagcacagagtgggagcttggggggtctcagggcaagtttaagaaggctgaggatgatgactgctcccctcaggcacacaaacagtacattccctgagtgcttttgagagctcagatgttgtcaaaaaaggaagatctggaggtcagatcaggacctagagtgcgaatgcctcacaagaaattgcgctcggaattcagtaagtatttattgaattaaaccgggctccctgggtggagctggagaagctggacaggtggtaccatggcctgtggggtcctctcctcaccagagctgaagaaggctgtgggccactgccccaccagtgactgatattcaggagcagtgctgttagcctgctttgcaggaaccgtccctctctggcctgtcttaccagatgcctttcaagaggctcaatgggaatgcccctcccaccatccagtaggattcccctaggccatcagcctcagtactctcttgttctcacaaattcacccacctagggatgtaatggtgaatgagactggctccttggcctaaaagaaccctgtcctgtaggaggagaaaagcttgtaaacaaatacattaccacaaggtgtaagacatgtgatagcagcaaagtgtctaaggtacagaggtgactggctgagtgtaagggggccatagaaagctcgctgaaggatttgatgtctgaagttgtgtattagggttctccagagaaacagaaccaattgtgtatgtgtgtggtgtgtgtgtgtatacagagagagagattttaaggaattggctcatgcagttgtggaggcttttcaagtccaaaatctgcaggatgggccagcaggctggagatccaggaaggaggagccaaggctaaaggtagtctgcagacatcattcccctgtcctctggggagggcactctttttctgttaaggcgttcaaccgagtggatgaggctcactcatattgtggaaagcggtctgctttactcagagtttaccaattcaaatgttaatcttgtctaaaaaatgccttcacagaaacatctagaataatgtttgaccaagcgtcttggcctatggcatagccaacttgacacaaaattaaccatcactggtgggtttaaaggacattgaggagtttgccacatgtctaggagggaaagggcatttcagccattgggaacggcgtgtgttctgagaattctccagctccatgtggctggaacacacagatggagggaatgagagaggtgaggcctccagagccatgccgtggggcctaaactagtggggaggctgaagggtcttaaaaaggggtgtcattatggattggagacagcctttgagcaaccttagaggatggggtggaaccctttctcctggtacacttagtgtagatagctcgctgaatctcagctgtggtagctgacagtgtacagggactttgctgattatccacctccaaaggcaaacacagcctgccaggtgcctacacggaggcttgcacgcccttaggcagtcgggtcattgactggtgtccatgaactactaggctgcccaggcaaacagggctggctgttcctaccctcagtggaactaggtgggcattgtgcatcggtgggggcccaggttcaggaacatcagaagtgttccccctaagggcagacaccatggagttctgagatgatgccctgcatgggaagggttcatcttcctttccggtgtccacatcctggaagggacattggcctcagccaatgagtcatgaatgcattgatttcctaagtcctggagcacaagtgcccacctccacctcttccctaggaattggtatgatgacagtgaaaaccgttttttttttttattgagacggagtttcactcttgttgcccaggctcactgcaacctccacctcctaggttcaagggattctcctgcctcaaccttccaagtaactgggattacaggcatgcaccaccacacctggctattttttttttttttttttggtatttttagtagagacagggtttcaccatgtggtcaggctggtcccaaactcctgacctcaagtgatccacccgccttggcctcccaaagtgctgggattacaggtgtgagccaccgtgcccagctgaaagccatttttgaaaggatgacatcataacagcattagaaaacaagataggaagtcatccgtgggacggaaacattcctaaatcttaggaagatagaaagcccatgagattgcacagacagagcaatcagagcagaaaacattgcagcccaggattccagaagtctcagtgatttttgtctcagaagagccaagcatagttcaagctgagagccaacaaagcacagaaaaggaatgggttagcagtgttctcccctgagagcccttcagaagagcaagtacagttggacccctccccgccttcttcacaaagaggcaggcagccagtggccgccaaattccccaacaaatgctctctaaggaaagtctgagacagcagctgagcaagggcattccagacctctctagcagactggatgtggggcagggagccagaagaaggattggcagctccgtctcagggtgaagtatagcattatgcccaccatggagaaaagtccttcttttggcaattgtgggagttccctggccacttcctgtccacggttattactgggagacttgccacactgcttcaccctcctgcagggaacctttccatgactgccaccctcacattcaagactgaactggtcagagaaatagacgagacacctcacgggaagccctatgtagttagtattccacttatatcttttttctcttcttctgtagtgatggaaattttagcagggcacacagccactcagctaaacactacactgcctcaccctcctagcagctaggagtggccatgggctcgtgtgagctgaaatgacaagtgcaactcccagctctgccctcccctttatcgttcccactgagtagggtgtggatgtgatggtgggagatggaagtcatgtgctgtggatatcagaagaccaagatcaaagatgtccacacggtgaagccaccatatcagccatggccacttaaactcagattgcacataagacagaaataaactgtctcgtctaagccactcctgcagttaggtccttgttataggagctagaacctgtatcctaatacatatcctaactttacaacataatccctcattcataaatatattggataaccaaaatcaccaaacattggaagcaaaccaatagaatgaaagagaaggcctaaaatggaaaaaagaaaaaaaaaaggaagagcttatttcaaaggaaacagtttgaatataagaaagcccaaaactaaattatcagtagtatccttaacagtaagtaagaggttctttcattcacctctgtaagtgaaataacctataatatcagaggagcaggttgctatgaagatagcacaattggaggaaaggaaatacttgctgaaattgtaaaatatcattatggaaaaaacttcagtggaaaaactgaataacacaatggatatgcatgaagaccagattggtcatttcaatgttaaaaccaagaaaacctcccagaaagcagagcaaagtctcaagaagaaaacattaagacccatggaggatagatccagaggttcagtatccatcaactaggagatctagaactagaagccacagacagtcagggggtgggtagaaatagtgaaagatatagccaaagaaatttcctctcagttgagaaatacacacggccaggcttggtggctcacacctataatccagcactttgagaggctgaggtgggaggattgcctaagcccaggagttcaagaccacactgagcaatatggtgagaccccatttcaatttaaaaataaaaataaaaaaaaaagaaacacacacagattttaaactagaaagatcatactgactttagggcaggaattagtaaaatgagcatgcagacccatcttggtgaaatttcagaacatcaaggataaaaaacaaaaaacttccagagagactcaaaaattacctcagaatttctcaccagtcatgcaagatgctccagtacagtggagtactttcacaattctggaggataaactaagagtcatcctgtcaaactttgaaaaaaatagttttttaaatgtgtaagattcagaaagtttgtcactcagtcacctatattttctggaagaaaataaaacctcctggagttatttcatcaatcaaaaaaggaacccaaaataattattaaatgaggttcaagaagaagtgaaggaagctatccatttttcttcttgtgaccaagtttcagtaacgtggaaccacttgcctttctcatgggtccattcatactgagtggcttcgcaggcaatgatatcttcataatgatgttgttaactagcttcactttttagaattatcctatagagtagacttaattatactgtcgatgagaatgtaattgttatgcaaaagcaataacatataacaaaaatctgaaggtgggcaggagggaaggaagtggaaagtagagaatgtggacaaattttattgctcatagtaggaagtgaatagacactgtctaaagttgatagatcagaaaatcgcaatttaagtatattacttgaagatgctaaaagcaactgccagaaccaccaaaaattggtaaccaccaaaaattgtgagatggggtggaaggaaattgggagagagaggttgaatgcgaaaaactctgcagtttcacagcagagagtcagtaccataaccaagtgaggacggtttggcattctggggcctagaagacatcagattttagagagattaataatttgagaagaaatggactttgtaaccacaccagtactacatctcttcattcagtacttgctgccatcctaacacatctgtcctaccattccagacatcagatgtatcatgaccgtgagaaggttcatttgttcactcaaaaaatgtttatggggaatttatttaaataaacaaatctgaaagctgatttgattcatgccctcagccccaccccccactactatgctctgcacacccaacactctaaccacactggaccttctcacacacttagggtttccccagcatctttctgtctttctcccactcatccccttttctgctcggtgagatcctgttcatccttcagagcccagtgtgtgtatctctaaagcctacgctggtgagccgtccctccccacccccaggagtcagcctctcccaacctgtactgggaacctgtttctatcatggcatctaccaccccttattatctttttggttcttttttctctttccctataagctttgtatttttcaggtgtaaagcccatgtcttttcaaaaattgaggtataacatacatacagttatgtacacaaaccagaagtgtaccgctgtactggaatagttttctttttaacatatgtatgtgtgtgtgtgtgtgtgtgtgtgtgtgtgtgcgcgtgtgcgtgtgtgtatgtaatatctatgtaaccacatcaagatgtggaacaattgtacacccagaaaactgcttcatgccccttcggagtaaatacccacctgccccattagaaatcagaaaccactatcctgatttcttttctttcttccttcctttccttcctttcctcccttcccttcccttccctcccctcccctcccctcccctctccacccctccgcttcccttcccttcccttccctttctctttttttttttttttattggagacagagtctcattctgtcacccagactggagtgctgtggcgtgatctcagctcactacagcctctacctcctgggatcaagcgatcctcccacctccacctcccaagtagctaggaccacaggtgtgcaccaccacactcagctaattttatttattttttgtagagatgaggtctccctacattgcccaagctggtctcgaattcctgggctcaagcagttcactcacctcggcctcccaaaatgctgagattataggcatgagccactgtgcctgggctatcctattttctaataccataagattggtttttcgcctatcctttaactttaattaagtggaatcatatagtatgtcttaggctgctagtacagaatactaaagctgggtaatctataaagtaaagaaatttatttctcacagttctggagcctgggaagtctaagatcagggtgctgacatatggtgtctggtgagggccttcttgctgcattcttacatggtgagaggtaccagggcaagtgagatgaagtctcctcagcaagcacttttatgagacacctaatcccattcactagggaggaatcttcacagcctaatcacctcttaatactatcacgttgacaatacctgaattgtggagtttccacattcacatcatcacacggcatatagtctattgtgtctgaattcctttacttattattatatctgtaagatatatatttttgtctgtagcagtactttgttcttttttattactatgtataattgttatatgaatataccacaatttatttatccattctatttgttgctggcatttgagctgtttccagtttttttggctatcatgaatagatctgctatgaaaattcttctttgtgttttttggaggacatacataggcatttctataggatatagtcttaggagtggaatttctgggtctgagggtaggtgtgtggcattagtctttgccaatcaattgtccaaatgtgtctatttaccttcccactaacaatgcacaagaagagttccagttgtaccacatccttgccaacacttggcgtcattttgtttgcttcatgttagctgttatggtgaatgtgttgtagatttaattaacatttccctaatgacaaaattgtattgagcattgttttatatgcttcaatacctcacttttaataacggatagaatatcaacacagaagatcaacagagaagcaaatgactcgaacaacactatagaccaaatggacctaacaaataaatgccaaaaaattccaccaaatagcagcagaatacacattcttttcaagcacacatggatttttctccatgttaagttacaacacaagtcttaacaaatttaagattgaaagcataccaaatatatattctgatcacaatgggatgaaactagaaatcaatagcaggccaggcacagtggctcacacctgtaatcccagcactttgggaggccaaggtggatggatcacttgaggtcaggagttcaagaccagcttggccaacatggtgaaaccccgtttccactaaaaatacaaaaattagatgggcatggtggcaggtgcctgtaatcccagctgctgaggaggctgaggcaggagaatcgcttgaacctggtaggcagaggttgcagtgagctgagatcacaccactgctctccagcctgggtgacagtgagactccatctaaaaaaataaataggccaggcacggtggctcacgactgtaatcccagcgctttgggaggccgaggtgggtggatcacctgaggtcagcagttcgagaccagcctggccaacatggtgaaaccacatcgctactaaagattcaaaaaagtagctgagcatgacagtgcgtgcctgtaatcccagctattcaggaggctggggcaggagaattgcttgaacccgggaggtggaggttgcagtgagcagagatcgcgccgctacactgcagcctgggtgacagggcgagactcagtctcaaaaaataaaaaataaaaataaataaataaatagaaatggaaatcaacagcagaaggaaattgaaaattcaaaaatatgtggaaattaaatgacacactgtaaacaaccattgggtcaaagaagaaatcaaaaaagaaattagaaaatacctcaagagaaatgaaaacaaaaacacaacataccaaaacttataggattcagcaaaacctgtactcagagagttcgttgtgataaatgcctacattaaaatagaagaaagatctcaaataagcaacctaactttatacctcaaagacctagaaaaagaaattaaggccaaggttaacagaaggaaagatataaggattacagaagaaataaacaatacaaaaacaataggaaaaaaatcaatgaaactaagagttggttttttgaaaagattttttaaattgacaaatcattagctatgctagaaaaaaagagaggagactcaaataaataaaattataaattaaagaagagacatcacaactgatgccacagaaataaaaaggataagagactactatgaacaattctatgccaacaagctggataacttaaaagaaatggatatgttcccagaaaaatacaagactaaattatgaagaaatataaagtctaaacagacctataactaatatgaagattgagtcagtaatcaaaaaactcccaacaaggaaaagcccaggaccagatagcttcactggtgaattctaccaaaatattttttaaagatttaacattgatccttctgaaaatcttccaaaaaaaattgaagaggagggaacacctccaaactcattttatgaggctagcattactctgatacaaaagctaaacaaagacaccacaagaaaagaaaactacaggctaatattcttaatgaatatagatgcaaaaatcctcaacaaaatactagcacatcaaaccaaatagtgcattaaagggatcatacaccatgaccaagtgggatttatccctgggatacaaagatggttcaatatacaaaagttaattaatgttatacatcacattatcagaataaagacttaaaatcacatgagcatctcaacagatgcagaaaaggcatttgacaaaattcaacacaccctttttgatcaaagttctcaaaaaactaagactagagggaaagtacttcaacataataaaagccatatataacaagcttacagctaatactatactcagtggtgaaaaacggaaaagttttttctctaaaatcaggaagaagctaagggcaagaatgcccttgcttgccatttctattcaagacagtactggaagtcctagccagagcaattaggcaagaaaaaaaattaaagacatttaaatcagaaaggaagaagtaaaattgttcctgtttgcagacaaaataatataaaatcctaaagatgccattaaaaagtattagaactaattaacaaatttagtaaagttgcaggatacaaaatcatttacaaaaatcagtggcatttctatacactaacaacaaactagctgaaaagaaaattagaaaaataatgtcacttataataacacctaaaacaatacttaggaatgaacttagctaaggaaatgaaagacttgtgtactggaaactacaaaacatttaataaagaaattaaagaagacacaaacaaagagaaagacatcctgtgttcatggattggaagaattaatattgttaacatgtccatactacccaaaacaatctacagagtcaatgaaacccccataaaaatctcaattacattactttgcctaaatagaaaaaacaattctgtgatttatatggaaccacaaaaaacacaaatagccaaatcaatcctctgacacaagaacaaagctggaagcctcacatttcctaatttcaaagcataaaaaattacactaatcaaaacagtatggtactgacataaagacagacatgtagaccaatgaaacagaacagagaacccgaaataaatccagtatatatgctgactgatcttcaacacgggtgccaagaaaacacaatggaggaagggtagtctcttcaataaatggtgctgggaaaactggatattcatatgcaaaagaatgaaattggattcttatcttacataaaaattaaccatacataaaaatcaccgtacataaagatcaactcaaaatggattaaagacttggatgtaaaacctaagactgtaaaactcctagaagaaaacataggagaaaactttatgacataaaacttctagaagaaaacataggggaaaacttcatgacatattcttattgaccatttagataacctcttgcttgtagtgcctgttaaaatcttttgctattttaaaaattgtggtaaaatagacataacattgaccaactttactattttaaattcagtagtgttaagcagtcacattgctgcgcaaccaatctctagattacttttcattctgaaaagctgaaactgtatacccataaaacaacagccccccattcccacagcctctggcaaccaccagttgactttctgtctctatgaatttgattactctaagtacttcatataagtgaaattatgcagtatttgttcatttgtggctggcttatcttacttagcataatgtcatcaagtttcatacacacaatggaatattattccgtcttaaagaaggaaattctgacacatgctacaacatgaatgaattttttatccattcattcatcaatggacatttggattgcttccacctttggctgttgtaaatcatgccgctatgaacatagatgtacacatatctctttgagactctgatttcaattcttttgagtatatacccagaaggggaattgctggattagatggtaattctattttttattttttgaggaactaccacagtgttttccatagaggctgcaccgttttacattcctaccagcagagtgcaacagttccactcactttctctacatccttgcaaatacttctttttcttttttttgttgtagccattttaatgtgtgtgaggtggtatcttcgtggttttgatttttcatttccctagtaattggtaatggtgagcatcttttcacgtgcttcttggccatttgtagatcttctttggagaaacgtctcttcaagtcctttgctcatttttttaaaaatcgttttgcttggctttttgttgttgagttttggagttctgcatgttaatcccttatcagatatatgatttgcaagcgttttctctcattcttgtctttttactctgttgatgttgtcctttcacgcatagaagattttaaattttgatgtaggcaatttatctatttgtacttttgttgtgtatgcttttggtgccacatctaagaagttactgccaaatccaatgtgatgaagcttcttccttatgttttctaagagttctatagttttatctctgagtttaggtctttgattcattttgagttaacttttgccattttcaggtgcgttgactgcctttttcttactcatttttaggaatttgttttcaaacatgtgttgcaaatatcctctcccaacccatggtttgtctttctactctattattagagtctttgttgaacagaagttttaaattttaatgaagcacaatttagcttctctcctttatgattatgtgattacgcgtttgtcaatcgagtaagaaatctttgcctaccccaagttccgtgaagatattttcttgttttcttctacaagctttattgtttaatcttttgtattcaggcctatcatttattcatttcacattcgttttctgtgtatggtatgatatcgggggtcaaggttcattttttaatatggatatccaatagctttagcgccatttattgaaaagaccattactttctctatcagatgcatttttcttgtaaatcaggtgactgagactgggtgtggtggctcacacttgtaattctaacactttgggaggccaaggtgggtggatcacttgagcccaggagttcaagaccagcttggccaacatggtgaaaccccatctctaaaaaaagatataaaaattagccgagcatggtggcacgtgtctgtagtcccagctgcttgggaggctgaggtgggagaatcacctgagcccaggacgtggaggttgcagtgagctgaaattgtgccattacactccagtttgggcaacagaatgagatcctgtccctaaataaataaataaataaataaataaataacatcatgtgactgtatgtgtgggagtatgtttccttaccctactctgtttccattgatcttcttgtgtctctttgtatcgatactatactgtcttgattactgtagcttatagtaaggcctatgatttatgtctgttttcatcttactggcctggcattgagaaggcccacgtagtacttgcagactgagtggagaaatgaagaaatgagttgcagtagagtgatcgttataactgctttatcattactatacagttatatctatcctgccatgtgggcaagaatgacagaagccacaggcagtcgccacctcttctgttagactacactctgtatgtcacccagtctcccagtcattttttcttctgtggttcatcttatagtgtgtgtgtgtatatattattgtgtattctatgtattgctctccatagtagacacaagaaccttaactacctaggaagcttgtaggtaggtgtgccttttgtgccacagtcacgtgtatagaaacaaaatgccatcaaaggaaccactagagacctgccagaaactgacaagagatcaggccactgcagcaaatgtggaatttgggtctctcttaggcggtgttgatgagagactggctggacacaaatggccagaagacaagcctgctgggcctgcgcaactctcatttcaggctttgttcttccctaagctctttcacccacaagcacttcctggaccatttaagataaacaggttgagttaagttcatagatgcccactgagttctcatgggtgtccagatgcctcttttaatcctcatgggaaaaatcggatataaataaacaatgagataggtaggtggatagctagctatgtacattacattagataacttagtagatgaattagctacaagcatctgggccttgtttgtagatgtgtgtaggtgaggtaaggctgtagcagctaatgtcagttcatttttggtctcaatggaagcaaggcttaaacactgtcgatacttttccaggagaaaggtaaaaaaaggttaacaagcttagcccttatgaaggaaaggaaggctgctaaaaacagtgtttggttacctgcagtgtcaggactgtgattcaaatctgtgtcctctctgtgaggctggtgtggcctggctgccttgagggtcaccactgcaggagtcacctgatggtccaagttcaggttctgtctctgctacttatcagttttgtgattttgggcctcagtttcctcacctgtaaaatgggaatgataatagtacccgcctgaagggtcattgtgaggaataaatgagtgaatttgcgtaacatactaagaacagccctggcacatagtcagagttcatttgctccgtctaggcacaggacattggtttagatgatcttcctctgaattattatgcccacagacaatcaggggaaatctgggcctctgcaagtctggcagagtagagtttttgctacatcattgcttgatcttgactgtgaaatgtgtttttgctttctatggggatgtcacaggagacttcattctccttggtgatatcagtttcacctggatccctgagctctctaacaggaagacaaataccagccgggtctaactcgtctaggattgcctaggcttctgtttgctttcgatagaatttgctttttgaccagtgtgcagaaattccaagccctgtttaggtcttggagttgggagggaggaggagaaggaaaagtaggaacacagagaccagtcatccaagggaaatgatttaagagcctcccagacagtgaaaaatccaccattcattattgagggaaaaagcagttaacaagaaactcagccctaaggttaacatggtcatgcagagtgacttgcatgcagggaggactttgatgcaagtgtatgtaggtggctgcagttaaccagggaagacttcctggaggatctcagatacagggaaggaaggtaggatccactcggtcattctgaccaagatcagggcccttgggggtttcctggatgttggccagcactcagggttcaaatcctgcctttgcctttttgtgtctgatctgaagcaattagcctcagccctgcccccatctataaaaaggggatgtgtaagaatcaatatgtttgttttgtttgggcatggtaggtggtcagttaagtgtttttaaatatttttaatattttactgagtgtggagttctgtatcaggcactggaaatgcaaatctgaatggagcctagttcctgcccaggccagggggaggcaggttcacctggaagacactgatgaactggttaagccacaggcctggctcaaggcagacatcccaggcttcttgggggaacagcactgtttgacccattggattagcagaaaacctcttccttccaacacaggctatctatggactctaggttgtgcctgttttccatgaatgaatccaggtcagagggtatgaggggctggtcaccctggaagcatggcccagcccagcagcagcagtgcgcccttgcccaccccatggggacccagttgtgccttccacctgctttcagagggcagtcactgaccacagctctgttagaagatctgcttgacataatgaggcttcacagtttgggactttatctcgtcattctggggcctaggaggggacgtgtggaaacacctcccagtgtccagaagccatcccagcacatcgtggggctcctgcctggagccctgaaacatttcctgtggccacattccagccccctgtgctttgcgtacattgaaccttgtattagtcagggttctctagagggacagaactactaggatagatgtatacataaaggggagtttattgaggagtattgactcacacaatcacaaggtgaggtcccacaataggccgtctgcaagcaaggaagccagtctgagtcccaaagctgaagaacttggcgtccaatgtttgagggcaggaagcatccagtgcaggagaaagatgtaggccaggaggctaagccagtctagtcttttcatgttcttctacctgcttttatcctggacacactggcagctgattagatggtgcccacccagattgagggtgggtctgcctttcccagtccactgactcaaatgttaatctcctttggcaacaccctcttcatccttcaatccaatcaagttgacattcgatattaatcatcacaagcctcccacctagagtctctttcttgcaaatctcaccatcaacatcttcccatagttcaaaacccagctcaaacaagggtatgctgactcctctgtggaattagtctccagactcctttctcggcatgtcccaccaggaacaacaatgtgtaaaggcagagagttcaaagtgtaagagcaggatggagagagaggaggccaggaagactgggtgggccctattttgacaggactgaaacgccaatggctgaatctctctgcattggggagctactgagaattactgacaaggggagaggtctggtgagcttggcaactgaagagatttctctttccacaatgaatagtggagtggggtggactgggagaaggctagaaacctggaagcaaggtgattaggaggcagttggaggaatttcatcagcttccccaaatgccagtagaaaagtatatgccagatttacaatattcacatggggaattagcaaaaatatagattctgggtccctttcccacaaattctatttcagtggatttggaatagggctagaacctgtgcttttatcagacaccacagacatttcagaggtggggaggtggactattcaataatgctgttgggacaactggctagctagggagtaaaaaaacttaagctttatctttacctcactccttacacacaaataagtgccagatggagccaaggtgacaatggaaaggaaagaagagaggaaaggagggaaaaaataaatcataatggaactagaagaaaatttgggtgacattctaaaaagtaatattggatgtgaaacctaaaagtcataaagggaaaaattaatggtacatttaaccacatggaaacaaaaaaaaattctgtacagctaagactaatgataaagagaagatatctgcaacctatatgtaaaggatcaatagcttcaatatcaaaagagtttatgtaaaccagaaaaatagtctcccaaatgaaataactgaatatgtttatgcaaaaatgctaagcctctctagagatcaagaaacaggttttaaaacataagatatcggccaggcggggtggctcacacctgtaatcccagcacttcgggaggctgaggcaggggatcacttgaggtcaggagttcaagaccagtctggccgccatggtgaaaccccatctctactaaaaatacgaaaattatctgggtgtggtggtgcacgcctgtaatcccagctactcaggaggctgaggcaggagaattgcatgaacccaggaggcagaggttggaatgagctgagatcaagtcactgcactccatcctgggcaacagagcgagactccatttcaaaaaataataataaaataattataactgaaacgtaagatatctttgtggtaggcaaaataatggacccccaaactatccacattctaagccctggaaactgaatatgttgcccattatggcaaaagataatttgtagatgtgatttaattaaggatcttgaggtggagagattatccaggtggactcaatgtaatcacaagagtccttaggagagggagagaggagtcaatattagaatgatttgttatgagaaagatgcggctggctgttaccagctttgcaggtggaaggggagccttccatgagccaaggaattcaggtaccctctagaagttgggaaaggcaaggaaagggattctcctctagggcccccagaaagaaaagtggccctgctgacaccttgcttttagccgagtgagacctatttcagacgtctgaccactcgaactataagatagtaaattttgcattaagccactaaatttgtggtaatttcttacagcagcaatgggaaccaaatacaaccattttgcctttcttattagctaatgttaaagagacagtttatattccagataggcaggaggttagggaaatagtgctcacccgccattggcggaagtgtaaatttctgctttttgaagagctatttgccagtccccatgaaaagcttcaaggtgtatcccctttaatcaagtattctcccttctaggaggttagcctgtgatatactcatacaagtatgcagaagatattctatgtagcatttcttggaatagaaacagctggaaacaaccttcatatctatcagtaagggactggctgagtttgagtacagccaaaaatggaatacagtgctgctgcccgcaaaaagaaagaggtaaacctagatatccatacatagatttaaaaaaagaaaaaaaacaagtcgcagatcaatataaatacattaggacgtcgggaagaacatatattaaattaactgtagcttctctggggaggggcatgtggggacagggagattcaggggaaagagccaaggatggtacaattctgcagtggtttaaaatttttcaagtaatttttcatttaagaattttcgtttaaaagaaggagaaagttccccagcatttctgttctgtcgttggtctttggaacttctggtctcgacaaaactaggggtaggaacccaagcccaaaggagaggcaggggacagaaacaaccagatttggggattgatgacatggctggggacaggggtggaggtggtgacagcccaagagagggtcagcaggtcaggacctggccagggcctagactggcagaagccggtgtccaggaggcctgggctgcttgctgggatacatgcggatccctgggcaggggtagttttctctgcacagaaccccctgattgctggtaggtcaatgctgtgggataccctgacctgagtgaggttagaatgttataggtgagccaagcatctgcagaaaaggcagggcttccaccaacaattgcaggttgcctggtgtcagcaactatagctcaggccagcacaggatccttccccagcccttcccccagagaagccaagaggatggtgggccagtaggtgggcctgaccttgccagtccacctctcagtcagtcccacggggagggttgccttttacaaagattagcaggtatcactagatggatgctcactttgaccaaggtctaacaggaatttgaggcataagttaccatgtggaattctcctcagcttaaggtcaatattgcagccagcctgagcaaactaggaaatgtggccagtatttttcagttggccacactgtcacctggtcttagatttcaaaatccaaaattgtcagaaaggaagtgatcttgagatcattcagcccaatttcatgttgcagaagggaaaactgaggcccagagaggaaagtgccttacctagggtcacacagtagacctgtgtgttccagggcttcctgccacaggttaccggacccatggcagccaaggtgactccaggcctcctgatctgcccttgctggaagaaacccacagaccaacccccagagaaagttgaagaaagcaagccagggaggcagccggctgcctgtggtgaggagacccaggtgctcagccccctggctctcaccaggtgtgctactcactgtcccacctgcagcccagacctctctgcccctgtagagctcccaagcaggtcaagtcagcgtcaggcagcacctgctcttcaggaggaattgacctcaaacagcagatcggaggactcagaaatgtctttagtttggcttgaagacttcccagcccgctctcgttgggtcggtcatgcctcttctctgggagtcagtgtctcccagaatcaaatggcaataagagggatgcaagtgttgtgagtttgaggacaggaatgtgctcatgtgactcttctatttggcagtaatcgaggctagaattcaggacactgacaagacagagccgctctgccatggtcctcactgaatggtcattatctcatgaaaatccagtgaccaagaagtacattggaggctgcaaagtctcaatctcagtaggagaaccatctagtgtggcttccatggagtcaggaagatggatctggtggcctggaaagctgtgtgccaggatcgtgatgattttcatccatgattatcagttctagcttgtgccctgggttggtatgaagccttcaatctgaaaagtatcccataaagtcagatccatcagacctttcaccacctgatcgcctgcctgtgttcttatccccactgctaggaccacttggctccagcatgcaggccaaggctctgcccaactcaagaaccaatgcttcccctgtttaggggaactcaggtctctcccaatatcctggtgggtcagtgtgacactggtttctgtgggggccctgctttgacctccgaattcaaccttggttctcatttcttgagcaccagctgtgtgcccgggactttacatacatggtaaccccagtcagtcttatgacagcctgtcagcctaaaagcagcagagccaggactggaatctagtctagagatctttccacacagccatgacagcccctccacagaaatgctttctccaatagcaatgatgattattatttattgaatgcttactatatgtcaggtgccatgccaagagatttatatgagtcaactcaatttaaaccacacatgacagttttactgtccctttttacagatggggagactaaggcttagaggggtgtccagattaggggaccatcagttaggaggtggaggagccagggttcagctgcaggctgcctgagtctcaaagctaccttgggagtcgctgtgctgtgttgccgcatgcatgggtttagtggctggatgcttaccttgctacaggtgcctgtcttgtgctttagaactaaaccctgatctgtgttgctacctctccctgtgtccccacttacctagacctgggttctggcaaacccttttcagcctcccagacaccaacatcacactccaatcccctggatgagttagtgtatttgttcaactgctccaaaagggaccaagtaacaagctcaaagatgtatgtctctctcaggggcaggtggctttgcttcacactgtcttcttgtcttcttgtcccactgttccttggggtgatgttcttgtccatgtggtcacagttggctcacccccaccacatccatgttccttcctgacaaaatggagaggtggagggcaagcacttttccttctggctgtggcctagaagttgcatacatcattggccagaactagctgcaagagaggctgggaaaggcagcctctagctggtggccatagacccagcttgggggcctttgattactacaagaaagagaactggctaatggaagaaatattcagtctctgccacaatccctgttcccagccagagctccgccttgaccttggcctctctctttgcccagacatccttctgtgactctttgactaccaatccctgttagtctccagacccatatgcttatatctggcttgttttgccaccacctgagcccacagccacttttagtatttttttgcaagtgaagaattctgctccagcttaaacacacacatgcatacatgcacacacacagagtgttgtacacagagatttttagaaggggcactggctttgttgctaggtcattaaataagaatatttactgagtgcctcctcttcagcctgtggccttgtgccctgggttcccaggtattaaagttaataggaaagttttcttatatttttgacatcagtatgttttattactgccagtaaaatttttgaccagattttggcatgttgggatatgtgggggtgtgtgtgtgtaagtaaattacaagcaaagagctgtattaagccccaccagcctggggccagcttagcctaacagctccttggacatcaggcccctgcccctatcttgccccagccttatctaactttgaccggggaccccagctcctcagtctagagcccaaggcagattcaagctggcctcctgccaggactggtggaattgtctacctgagagagcccatctcccacctgccctctggaaatgtcctctggggtgtccaccctgggccatggtcatgttgtcctgacgccttcgatacagaaggtgctttccagtttggttccagagcttcaggcctccctgccttggccccgggctcctccattacttcccactcccctgaggcttttgtggctccaaccccagcaagtcccgatctccttcctattgggctgctcccacagctagaccaaaggaagcttcttgaagtgggagctaaccagttggctgctgaagctcaggttcccctcagggttataagctggtctctgagcgagagctctcactggcctcatggcccattctgtgaccatcagtagaggctgtccatcctcttctggtctggggttcaggcctctgttggcccagctcctgggcccatttctctggtgacttttacaggtgctctcaccaattccctggaaaagtggctcttttctttatcacttcaagtttgtgttaaaatttcacacataccctcagaaccacagaaggtagaaaagaaccattttcttagtgtctgttggtcacagtcattagaacggtccttcggtttatgccgcaccacatttggaatccattccaagacagaagtctccttaggtcctgcaggttcccctacatctgcacctgtggtcctggctgcccttctccccctgcccctcctcttaagcacttcagacctgtcatggtgtggtagagcaggctggcagagagcactagtccagaagtccaagccccagtgtggcttgggctagccaccctccaccatggctcagatgcctgttgtgcagaatgacagggtggcccctccagctcacaggcctcgctcactctgcgccctggcagccaacggtgctcctgtggcctttttgctccccactcagaagtgtgggtaggaggcctctgcttggagaaacaccatgtccagcccacaggtgcaggctggacactgaccctgggcaggcagtgctggccctgtagtcatctgatgatgcagcagtcatctgactgtctccttcatctaccctgcccctcccacctggccctgggaattgcaccaaaccccagctgctgggcgctccaccacctgccaaggagagccttgtggctcagtgaggggagaaggcaggactaagcaatgtagagtcctgcctggccagctgacccccactcagattgatcatttcaccacccagtcatgctgcagggtcccatccatccatcggaagaagcaaagcttaccactagctggtgttttggggctgctctcagatccttgcatgaaaggatcaataagaatagtaagtatagccaacccttgattatccacacatagcacccaaaggcctctccatcacagtgcagccaggctgaggaggcccagcccagcccaaagagcagttctctctgtgctgcaaaccatgtctaccatgtctgatttttagaaggctcagcacttctgcccgccttagcttaggtaagcaagacctggggtaaggctgccaggacgagttccccgacctttgctgggctcccctttcttctgtccagcagctgcagtgtggttaggacataggttgaaagggcaactctattgttcagatgctagacaattccttactccctcttgccgtggatacagcgatgtcccctggggccatgccggtgcttccataggactaggggccatagactgcagtgcgcatcatgccacagaagccacagagaacttctgttaattgaggtgggagacagtcctggctggggggtcaagaggcacaggatggtccagtcctgccaccattcccgtgtgattttcagggaaaatcatatcacctttctagccttcagtctcttctgtcaagtgagaggaatggactagacagtcagtctctaagaatctatcagaagatcacggtgtaactttagtctccatagaagagatcaaaagtatgtatgagacacccagagacagttggcacttatgcctagttttggccgtaaggcaaatattaattgtaagggtaaccattttgtcctggtttgcctgggactgtctttgtttattcctgttgttcctcgatgattgttagtagttcccatttcattctccaagtgtcccagtttggatggtatcttatatggccaccctgttgactgagatgtaatctaatgaaatgagatttgtctgtcttccccacactcagcctgctttggtacaagtcacaggaggcctttgactgctcataggagaatctctgctgatacacagtctttcattgacaaatatcaatcactgtatttgcaccatatccaatgactagagggatgtcattgaatccgtcactgtattcaatgaccagaggggtgtcattgaagacataaatgatctcctgcatcattcactgctcctgactgaagtgctacatgaaaaagttttgcaagaaacttagatgttccatcctgtctggctataagactccataatggaccaaatctcccttttctccttggctgccaggaagctcatatataaatatatagctgaattatagaaacaccataagtccttattattggtatagcagtactctttttatcccaccaatcctgactttttgccttatttccattttctttgttctgatttgttattcttatttatgattttctcatatttatagtttgtcattcttctataaatatggttttgttatagttactttgaattctttgtagcaccaagtagaaaaggcacacaaaaggagtgaacttagaggatatgctttttagctaaaagatcaaatcacctgctcctccaaagcatatcacagtgtccgagggccctgccctttaagagacaattatttgagtcttaaagacttgttcgtcttctgagcacctgcaaaaatgtagtaagtggcattttcaagtctgtatcatcacacacctagtgaaacgcagagtgtgagcatgaggggagcctgagggcaggatgccgggggtagggcatgctcacaggagaaaaagcaagcacagagatgctcatcactcacccagggcctcgccaagggatgccaggggatggacacctgagaaggggctggggaacaaactctggccatgggaggcctgggtccaggtggcaacactgcctgttagcaacacgggaccttcagtaagccatcttcatgatgtccaaagtcaggtggttgggtgagatggagtccatggtgactccagccttgggattccgaccctgttcctggggaggagggccctgaggatgcacctgagcccaggaagctgagactgccctgcttgcagctggccctaggaggaggcacacacttggggctatatgcagaccaactttgctcctccacttgagggcaatgatccccatatttccatggcatccccagggcactgactggacaaggaaaggctgcaaagccagaggaaccttccagaatgatcctcctggcaattgcttggatcaagcaaatggtcacagctgtgtcagattgtaagttctcacaggctgtggcagtagtttgcagttttgtcttcaaacatgggctggggtgcgggttagcaatggggtaaaaagcagtgaatgatgtcccttgtggacactttcagaacccagggccagagagaaatactaacctgagaataatctaccccttggaaaactcacccctgaataaaccacaggcacttccctcctgcaccagccatggccccatccagagttcacccagcagcatctgcatctccaatgtcattgggcccactgcagctccgaggcacagtcgaggcaggatttgttatctgttttaccgattaggcaactgaggcttagagagcttagacccactcagagtggatcacaaaacagagatgagagcccaggcctctgtccctaaccaccctgcagttcccagagcccactttgccttctgttctcagcatcccacatggccacagtcctcagaaacacactggcattcaggtcacccaacactgacatgggagcgggggaggaaagaattgcagggcttgggcatgtggagccggagcctgtggttctgcttgagtttccctggttaacttttgaggggtctcagccaggtgtggcaccgagtctgggctgcccaggctgtgcatgagtcccagtaactctgtcttctcttttgtgtgtgtgtatttctgtgtgtgtgtacatctatcacacagaagaagagcgtgatttctcctccaaggccgttgatctccaacccagaactaaaggggagaagagccacccccagcatccagcgtggcatctcttgtgccaggaccagggatgactgggccatggacacagatgtctccaaccttcaaccgtttgcatagcacacgggggactcgtgggggccacctgccactgccagctgaaacaatacaatggcaatactgacatccttcatgacgttttcccgacagacattcaggcagaaagtgctggtgcgttttctgtctgcaaagtagagggccatgcctcaccaatagaatagcgtgggccctgatgacctgctccgagtccactcacagccagtgacacttgcaaaaaactcccaaagccgtcttgggtttggctcccacagctcttgaccaatgtggccaaagctggacacctccttgggacactgggattattcataaatgcagcccgccctgactctccctgaatagcatctgaagtctttgtgaaggtcatggatcctgaacaaagtgtcaagggcaccaagaaggctgagggaagtccccggaagcggctgaccaaaggagaggccattcagaccagtgtttcttccagcgtcccatacccaggcagcggcacagctgccacccaagagagccccgcccaagagctcttagccccgcagcccttcccgggcccctcatcagttcttagggaaggctctcaggagaaaacgggccagcagcagaagccccccaaaaggccccccatcgaagcatccgtccacatctcacagcttccgcagcaccctctgacaccagcattcatgtcgcctggcaaacctgagcatctcctggaggggtccacatggcaactggttgaccccatgagacctggaccctctggctccttcgtggcccctgggctccatcctcagagccagctccttccttcccacgcttccatcattccccccgaggaccttcctggagtccccaaagtcttcgtgcctcgtccttcccaggtctccttgaagcccacagaagaggcacacaagaaggagaggaagccccagaagccaggcaagtacatctgccagtactgcagccggccctgtgccaagcccagcgtgctccagaagcacattcgctcacacacaggtgagaggccctacccctgcggcccctgtggcttctccttcaagaccaagagtaatctctacaagcacaggaagtcccatgcccaccgcatcaaagcaggcctggcctcaggcatgggtggcgagatgtacccacatgggctggagatggagcggatccctggggaagagtttgaggagcccactgagggagaaagcacagattctgaagaggagactagtgccacctctggtcaccctgcagagctctccccaagacccaagcagccccttctctccagcgggctatacagctctgggagccacagttccagccacgaacgctgttccctgtcccagtccagcacagcccagtcactcgaagacccccctccatttgtggaaccctcatctgagcaccccctgagccataaacctgaagacacccacacgattaagcagaagctggccctccgcttaagcgagaggaagaaggtgatcgatgagcaggcgtttctgagcccaggcagcaaagggagtactgagtctgggtatttctctcgctccgagagtgcagagcagcaggtcagccccccaaacaccaacgccaagtcctacgctgagatcatctttggcaagtgtgggcgaataggacagcggaccgccatgctgacagccacctccacccagcccctcctgcccctctccaccgaagacaagcccagcctggtgcctttgtctgtaccccggacgcaggtgatcgagcacatcacgaagctcatcaccatcaacgaggccgtggtggacaccagtgagatcgacagcgtgaagccaaggcggagctcactgtccaggcgcagcagcatggagtccccaaaatccagcctctaccgggagcccctgtcatcccacagtgagaaaaccaagcctgaacaatcactgctgagcctccagcacccgcccagtaccgccccccctgtgcctctcctgagaagccactcaatgccttctgccgcctgcactatcagcaccccccaccaccccttccgaggtagctactccttcgatgaccatatcaccgactccgaagccctgagccgcagcagtcacgtgtttacctcccacccccggatgctgaagcgccagccggcaatcgaattacctttgggaggggaatacagttctgaggagcctggcccaagcagcaaagacacagcctccaagccctcggacgaagtggaacccaaggaaagcgagcttaccaaaaagaccaagaagggtttgaaaacaaaaggggtgatctacgaatgtaacatatgtggtgctcggtacaagaaaagggataactacgaagcccacaaaaaatactactgctcagagcttcagatcgcaaagcccatctctgcaggcacccacacatctccagaagctgaaaagagtcagattgagcatgagccgtggtcccaaatgatgcattacaaactgggaaccaccctggaactcactccactgaggaagaggaggaaagagaagagccttggggacgaggaagagccacctgcctttgagtccacaaaaagtcagtttggcagccccgggccatctgatgctgctcggaaccttcccctggagtccaccaagtcaccagcagaaccaagtaaatcagtgccctccttggagggacccacgggcttccagccaaggactcccaagccagggtccggttcagaatcagggaaggagaggagaacaacgtccaaagaaatttctgtcatccagcacaccagctcctttgagaaatctgattctctcgagcagccgagtggcttggaaggggaagacaaacctctggcccagttcccatcacccccacctgccccacacggacgctctgctcactccctgcagcctaagttggtccgccagcccaacattcaggttcctgagatcctagtaactgaggagcctgaccggccggacacagagccagagccgccccctaaggaacctgagaagactgaggagttccaatggccccagcgcagccagacacttgcccagctcccagctgagaagctgccacccaaaaagaagaggttgcgcctggcagagatggcccaatcatcaggggagtccagcttcgagtcctctgtgcctctgtctcgcagcccgagccaggaaagcaatgtctctttgagtgggtccagccgctcagcctcgtttgagagggatgaccatgggaaagccgaggcccccagtccctcatctgacatgcgccccaaacccctgggcacccacatgttgactgtccccagccaccacccacatgcccgagagatgcggaggtcagcctcagagcagagccccaacgtttcccattctgcccacatgaccgagacacgcagcaaatcctttgactatggcagcttgtccttgacaggcccttctgctccagccccagtggctccaccagcgcgggtggccccgccagagagaagaaaatgcttcttggtgagacaggcctctctgagcaggcctccagaatctgagttggaggttgcccccaagggaagacaggagagcgaagaaccacagccctcatccagtaaaccctctgccaaaagctcattgtcccagatttcctctgcggccacctcacatggtggacccccgggaggcaagggcccagggcaggacaggcccccattggggcccactgtgccctacacagaagcactgcaagtgttccaccaccccgttgcccagacacccctgcatgagaagccatacctgcccccaccagtctcccttttctccttccagcatctcgtgcagcatgagccaggacagtctccagaattcttctccacccaggccatgtccagcctcctgtcctcaccatactccatgcccccacttcctccctccttatttcaagccccaccgcttcctctccagcctactgttctgcacccaggccaactccatctcccccagctcatgcctcacccagccaacatccccttcaggcaacccccttccttcctccccatgccatacccgacctcctcagcactgtcttctgggtttttcctgcctctgcaatcccagtttgcacttcagctccctggtgatgtggaaagccatctgccccagatcaaaaccagcctggccccactggcaacaggaagtgctggcctctcccccagcacagagtacagcagtgacatccggctaccccctgtggctcccccagccagctcctcagcacctacatcagctcctccactggccctgcctgcctgtccagacaccatggtgtccctggttgtgcctgtccgtgttcagaccaatatgccgtcctatgggagcgcaatgtacaccaccctttcccagatcttggtcacccagtcccaaggcagctcagcaactgtggcacttcccaagtttgaggaacccccatcaaaggggacgactgtatgtggtgcagatgtgcatgaggttgggcccggcccttctgggttaagtgaagagcaaagcagagctttcccaactccatacctgagagtgcctgtgacattacctgaaagaaaaggcacttccctgtcatcagagagtatcttgagcctggaggggagttcatcaacagcagggggaagcaaacgtgtcctttcaccagctggcagccttgaacttaccatggaaacccagcagcaaaaaagagtgaaggaggaggaggcttccaaggcagatgaaaaacttgagctggtaaaaccatgcagtgtggtccttaccagcaccgaggatgggaagaggccagagaaatcccacttaggcaaccagggccaaggcaggagggagctagaaatgctgtccagcctgtcctcagatccatctgacacaaaggaaattcctcccctccctcaccctgcattgtcccatgggacagccccaggctcagaagctttgaaggaatatccccagccatctggcaaacctcaccgaagagggttgaccccactgagcgtgaagaaagaagattccaaggaacaacctgatctcccctccttggcacctccgagctctctgcctctgtcagaaacgtcctccagaccagccaagtcacaagaaggtacggactcaaagaaggtactgcagttccccagcctccacacaaccactaatgtcagttggtgctatttaaactacattaagccaaatcacatccagcatgcagataggaggtcctctgtttacgctggttggtgcataagtttgtacaaccccaaccttccgggggtttccactaaagctgctttgtccctcctgaggtctaagcagaaagtgagcaaagagacatacaccatggccacagctccgcatcctgaggcaggaaggcttgtgccatccagctcccgcaagccccgcatgacagaggtaagttcagccttgtttttcttctcatcactgatttgcaaaagcacttggcgagcttttaaagccacagtatcctcaggttccagttgcagaactagagccagattagtagtcagatttcctctctgaaagctgagactggtcaccttacaaggaaacatgtttattgagtttctttgtcactgtatccctcatatcattggaatagatacacttcaataaagttagccataaagtgatcctgctctgccatgaatttctgttgtgaaatcaaagatacagtctcagtaagaaaaaaaagaaattttccaaaagactgagttggaaaacttggctaacaggaatgcctgtagcaattttagaactttttacctctccttcattatatggatatcccttgtcttgttagtcttttcctgcttttcttaattcttacatctgctgtttccattctctagtaccactttaaatcttcccatttccaagattctagaatttggcacaaacaactcctgaaatattccttcttccttttctgggagtaagacagcaaatggagctgagctgcagtatccctccttaccagtggatggcaatgccactcacagtttgacctatttgtgctacgtggtcaagaaacgctaatgtttacgctttcattgcctttgatctgaggctacatcaggagctataaaatgaactcgtcccctgaaagctcagcaagtttgaaattcaataatttcaaatgtcagacaaaagccaccaccataccctgacaaggccagcctagggatttggattgtgctgacttggcatttgtggaataacagctggtcttgtttactgagcagcctcatggtgccagacactgtgctgggcccttgaatctggtcactgctcacctccacctctgaagtaacataaccatctcccttctatagcttagggaactgagggtcagagtctgagaaaggtcaagataatctggcaaatgttgaacaaacccagaatttgaacccagacctatctgactccaaagagtctatttttcttcttttaattatttgaggagagaaaatcttaaaagttgactgcaaattaaaaaatgtttattagtgtgtcttcagaccagaagctctgaccaaattaggtctaaattccctaaaccaaattcatattgtagataagtgagcacaactgtgttctataatttcctgtgctctcatatcttccccttttgtcattcagtgaactttgtgcattgaatttgtccttagcttgactggatgttcttcacagaactgttttccaaatttattccctagatgtctttgtcagtctacagacatccctgaccaagatttccacttttgtgttaatgtcctgctaatttcctcttcagcgtctcttactagctgtggccactcccaagatgctgttataattattcatactgctaactttttggatacctattatgtaccaagtactatgctaaatgttacttttctcctcacaaccaacttgaaagttagggtgcaatatcaccatttcatagatgaggagaccaaaatacaagagaggttaagtaactttcacaaggccacacagtaaatggcagagcctagatcaaaactagattttactccaatgcccttttgaattatctaagctgcctctagtttctaatgactgaaaatgttacaggccatttaagagaaaggaagtgttaatttggattcggcaattatttatttatagtgctcctaaaacctgcgaactttttcttggaatattctgtttggttcactggcatgtttccttccagaattgcaccaatctggtacattagtataaccacatggtctatggcttaaggccttttatacaactacacctctctctggtctctgcttgcatacttccagcaagaggaactcaccatctcatgatgcagtccaattcatctttggacagtgctctaagaaggttctttactgtactgagctgacatttgtcagcttgcggcttccattctctgttagtagttctgaaaaagtccttaggtctatcttagcattttgaagctcttccaaaccatcttcatgcaggtctaggacaccccatgatgtttttgtttggtcatagatcttttcttccacgtataaaccctggagaaaccccagcttgttcagagtccactttgtagccacattctttcctttttcctccttgggaatcattttgacaacaacacagcactgtcacaaagtgattaagaacaaggactcaggtaccaagttgcccaggtttgaatcccactaccttacctactggctatgtgaccttgggccaataacttcacctctctgagccttagtttcatcctctgtaaaatagggataataataacacttagcgcataggactgtggagataattaaatgagttaagacatgcagagtgtgcttagaacagtgtatgccacactggcactcagtaagtatttttaactatacttattcatattgttgtcatcaaaagctaaaatggatccctggtccctgctcagttccaacactgtgtttcctgggaaagtggtacactgccacccaaaccagcctcctccagtgtggcccagatatcacggcaggctgtgagggagaagtagtctgtttgcctgtgggaggcaccttggtcattacatggacagtctagatctcaggccggggtgcagtggaaatggtaggctctggaaacccaagggtattgcaaaaaactagctgccttctgccaaagcagcagtccagattcttgctcggtttccactcccctcctccaaatctgaagagattatttggtggtcactgagtcacagaagttgccctggaattgatcttcaagatggtctaaatcccctcagactctgaggcccagagaggtgaagtcatccaccaaacggcagcccagtgtgccatggcctatctggtgctggaactcagactccctgattcccagccagtcacctttctacctagccccatgctgtccttgtgggggcaggtgtggtggctggcaaaggggactgccgttcttagattgccccagcatcaggaaatgtggttgcttcattcactggatggaaacagcatggtttttcatgaccttaatgacagtggcatgaagtaggaggaaattctcactcccagcccctaagcacagcatttctgctccctaggcaaaagtgcacccacccctgacaacactgcagtgtttacaggacgtgttcttgggatagtggaagatgtccaggaagcacaaagccaatgccagctctccccttaagctagctctcatcactgaggtgtggctctgtaaagagcgtgggtcctgcaggactaacagcccagagcctgcacagcctctctgtgcctgtctctatggtggaattggggacgtcctgctggtcagggtcctcagcccagctcctggcctttggtactagctcaggagggccaagatcctggaagcaagagacctgtgctctgctcccagctctgcccttaactcgctgggtgaccttagctttctgatctataaataagaactggaccagttcatctccaaaggcagagtggagccttgttcatgtgttcaacattatttaagcctcttctctgagacaggccctgtatggggttctggggtgcccaaggagaccaagatgaggacctgtccccaggagttcccagactagtgtaaaagacagagaacaaacacaggtcttatgggaggttaacatgaaagagacagggttccagctgtaacaccaactaatggcatggccttggataagggaattctctctggggatcagtttccttaattctgtaaagtggagctaatagcacctcttcatgggggagtgtgaagattgcatatgtgtacttgtgcagtactgtgtaaggcatgattattagcattgcattcgtgactgaggatgcacttttaaccagcaatgattttgtcattcctgcggtgggccaggttcacctcccttcactggtttccccggaaggccagaaagatctagctagagtggagaaggaagaagagaggagaggggagccggaggaggatgctcctgcctcccagagaggggagccggcgaggatcaaaatcttcgaaggagggtaagactcatgtttggtttccatcgtctgcttccgtggaataagagctggtgcccattggtgttcacgggcagcagtggctcagttggcaagggctctgcccacaggtgccctgtggtcccagcgatgcctttcagcagacatcaccttcctgggactctcaggcccctctgtttaagaatgccgtggggcttcttggtggggatgggtgatgctgggtatttgttgaggatctggagaggtctgggtctttctccagcccctcattttctcagatcctggccaggtttctagttcctgcattggagttgccatcccagtatcccagcaaatgtccagacttctgtctctcttgacatgtattctccaaaagtcatctctgtactgcccaatggccatcttggcatgtctggtttcccatggggcacttgggctcagccgactaggctgtttgcagggctgactgcacactgtatgcaccaggtgtttccactggtccctatcctgactggctggggcccagggctcaatggttggtgaatattttgaatctcattcatagttattcacctttgatgcttgactttgggaaacgaatggtctaaacgtttcagagctcacagcttcagggactgtctgggctctggaagggtgccgtgtttcagacgtgctttgtggaagttttgtgccagctgtgttttgtgtggccacatgtttgcttcctgggatttgggtgtctgtgagcaggtcccatggcgttctgtctcagggtcctgtgtctgtgtccctggtgtgatcagggtggcctggtcctgcacagccctgaaggacaacaacgtagaggaaaatgcgcttcctgtgcaggacagtccccatgagctggggccaacatggctgtcactgggggcctctgatcctctagcacctgcaagcgcctaactcacagggtcagcgtgggaggcacgggagtcctccataaggttgggggacaacagagactgccaccctccccagggccaccagttggcatcttctggtggcactgaccagcaggggctctcaggagagagggtgcttggaaatgtgggcagcagggtagtcaatgatgggaagggggccaggggtagcaaatgcccctgaaacctactgcctaaaataccaatagcagctgcgttgaaaaaacactgaaccaaaggtctttgaaaatgccaaccctctttccgtgtggggagggacgcgggtcctcctgctgtttggttagagcgccctcgtgtgtctctgtgttctcatgccactggatcccttagaggccacacagaggcaggattgatgaagcgcctgctcacagcgactggccctcttccttcttgcttcagaggttctctgtggtctctgagggctgctgagtgtttcctggtgtcccaggagcttgccccagcagcagtctgtgtgtgcccggggaggttcgcatcttccctgagaggcaggtgctctgagacctcaggaagcctgagcctccagaaaggcagctggcaggagccactccgtgcccagctccctgctggatgtctctacctacacggtctgcaatggctgaaggagggggaacatcacccacaagtcctcttctcttcctccagctggtatgggtcctactccctctccacctccttccaggtcttcacttagtcccacctgctctgcttcagaatcctctcggttgagttctgtcatctctgccccacttacctctgttctgcctgagactagccccccagctctcccgccctcagtttctttatctgtaaaagggggagaataacatttgtaaaagggggaaaataacatgtgggattttcagaggaccttgtgagaccccatatgaaggctataattcatagctgctcaaaaaatggacattggtgcattttactactagtatatccattttgtcaatctctgtctgggacagtcccatctgttctgtcagatatggaaggtatcctctccctttcaacttgtcacatgcaatttgagcacgtatggaactgattatagtgtcagatcctttcctcccccagcctggctatctcaagctgggaccatgcctcccactctcacttctggtgattcttctacattcatggttctcttggggctggcatcaccccgcagagtgtttggaaatggtgaaggagggggagggcattttggttgccacataactggcatttcagggacgaggccagagatgctgaccttccattccaccagccttacaacctcttgttcccccaaattgccaagagtgcccacacccagaatcactgggcacactcctctgcaatcccacagttttgccttagactcagttcttccttttttttctttcttttttaatacaacaaacatatgtatttcactcctgtacacatttgagaaggatctgctatggagctctgttccttagatccaggccagtagaggctgagagaggaagaagaaaacaatggttccacccagaagcttctgctcacatttaaatggccaaagcaagtcacatggcctcacctagctccatgggagtagagaagtgcattcctaccgtgtgcttgggagaacctgaaatatttggtagatatagtgctcatgactattcaaattggtttaacatacatctgtaacttgttatgtttactcaacagtgtttttgacgtgcatccatgttgatacatgtagacctagttcatcatgaatcagtaagccagacacaaaagagtagatgctatatgagtcttttaatctctaattaaacttgccttaatttctttcttgacctccatttcagtgactgatcaatttattaattcatcagggaggaggatctacttaatcagtgccttttgggtgctctgtgtcagaaaatgcagtgtcccatgggggttaactgtcatcctgccctcaaggtgcttggggactacaccaaggtggcaacacaagacccactgctaaggtggggatggccagagctgagaagctcacagcaaaggaaggatgcctgggggatggaatagctagagagggcttcccggagtgggtggggccgggcccagaagggtgggcgagacccagacaagtggagaggaagggtacgctgcccagcagtctacctgctacaggtgtgatggcagctcccatacctgatcagtgagactcacttcctcttgccttgagcattctcccttggtagtgtcacccatctccttagccccaggcctcatctctgtgccgacattgctacatctgggtctccagccaggacctcacccctgaactgcagacactggttttgatgcctcctgagcatttttgcctgggaaattcacacctcacacttagcatgtgcaaaccaagccttccacttcccaccaacagcatctccttccacatccagatctcagatgacacacccagcccttcacactcagaaccttaacattgtcttggacgccttctccccctttccagttagaccccaatcctggtgtctgcatgaagtagtcagtgactcagtgtggtctctttactccctctgccactgctctggccaccctatctctagaactccaatgttggtgccactgagcatcactaaacatgattctgcctgtgtcatgcttttctccagagccgtctgtggctgcctcacctacaggatccagtttaaactcagcctgtgagtgctggcctcagaatctgacctgttcctgtcgcccttcaccttttgctgcctgctgggccctgccattgccaaatcctacccagccttcaaaagccaatactcagccctgctcctctaacgagcctcccaaatccctccacactctgtagttctttgtgttacttctgtcataacactggtgctaagatccatttctgtctcctcccaagtcccttcttgacttgggtcctggggtaatgctttgcacacacaatgcatcagtctctgtttattgcactagtttcctggcacatggccccctctgcattccccatcacttccacacctgaacaaagcccgcattttccaggcagcccctgggagtgcccatcagggatgtgatggctctctcacccagcacctgtgcatttgccttggttgtttagaatggctttttgttaagcagtgttgttttcacacacacaaagttatgttgttccttgagagtaatgactatattgtcttaactcaagttcacttattgcaaggaaagctgggaattcagcccagtgggcttacacggaagaggaagagactggaattgataggaaccacctggctgaccaagcccagttgggtggtgtgttattggggcttatgtccgaagggaatgataagttcagatggtgagatcccaggagtccatgccagaccctgcgtgctgcaggactcagctgctgcacctcctatgggagggcattggctcccatcccacctcacctaccccagtacctcactccagccattgccactctcctgggccaggagagtgctccttaagcatacccagacttaaggtttccaccttaaaaatactttggctgaagggccatattgccagatttctctgtttcctttaaagaaaaactccagaagaaggtgactgtgttgctcacctccgtatctttcctcctggcttctctcagacctattcaaggtgggcctttgggctcctcacacctcagaagctgctcttatccaagtcaatgatgaccctcaccttgcagaagtcagtagtcagttctcacttctattctttcctgagccatcggcagcatttgacacagtcaatccttcgctcgtccatgcaggactttgtcctcttggtttcctggacactgcctgtattagtctgttttcacactgctataaagaactgcccaagactgggtaatttataaagaaaagaggtttaattgactcattcacatggctggggagacctcaggaaacttacaatcatggtggaaggtgaaggggaagcaaggcaccttcttcgcaaggtggcaggaaggaaaaatgcatgcaggaggaactaccaaacgcttatgaaaccatcaggtttcatgagaactcatgcactgtcaccagaatggtataggggaaactgcccccatgattcaattcctccacctggtctctcccttgacacatggggattatagggattacaattcaaatgagattttgggtggggacacagacaaaccctatcaccttctttcttgatcctcctcttccttgactggttacactttctcaccatcttcagtgagtcccatcatcgcctgatctctgaacattagggctccacatggcccagccccaggctccgtgctcttcctctaaactcagtcccaacgtgatctatacaccatctacaggttgatgacactcagatccctatctccaaggacttctcctctgaactccgggtcatgcatccaacttcgtatctgggaggcggtccacctgcacatcagtgaacccaccctttgtccacagcacagcgcatactgcagaactgtgtctcaggcctctttgacattccttaaagaaattattttaaaagtttatttaattcattactgttccagttgaaggggttacatttttaacgagtgtacttttctatctcatctatttctatagctgaattaatttttatccaagtcttaagagttcatgcagtgtacgcagcacgtttttgtgacagtgcatttgtacattttgaagtgtgtgtgtgtgtgcctgtgtatgtgcacacatacctgtgtgtttcatgaaatagtagcttggagagaatagtgttagttttaaaaaatctaaagattattttcttttctaatagtttttttacaaatccatttcttcttggactttgaaacccagaagtgtagcatgattttcagcctaatcatctgctgtgcctagtcccattttgctgtgaactccagatttagaattatgtctttgggaatatgtgttacctctgtgtatttattggggaacaaattgattaaactatgaattaaataagtggtaataagttggagccttttggataggtgtgtaaaaaataaagtcagtaagccactctaagaacctaaacagtagcaaaaccacataccacaggagggttggtggcgtggaggttgggaaatgtataacataggtagacaaactgtgcccattacccacacttgctttatatctctttaaagtcttttaagtggtcaaagatgggtatagtagtcagttcttgcattgctataaagaaatactgaagactgggaaatttataaagaaaagaggtttaattggctcatggttctgcaggctatacaggaagcatgctcctggcatctgctcggcttctggggaggcctcaggaaactttcaatcatggcaggaggtgaaggggaagcaggtgcttcttacatggctggagcaggagcaagagcgggagggatgtgtcacacaagttttaaacaaccagatctcagaactcactatagtgacgacagtatgaagaggggatggtgttaaaccataagacactgcccccatgatccagtcacctcccaccaggccccatctccattactggggattacaatttgacatgagatttgggcagggacacagatccaaaccatatcagtggggaaaggcatcttctgaaggagagcggcaaagtcactcattcagttaagcaagatggacattctgcataggcagtttcatttttctagatgcttggaccgaaagccactctgtcttacatcattagcaaatcctggcagcttggccctgaaaccgtatctagaatctgcccatttttcccaacctctgggtcaagccactggtagctcacacctgggtgatcacagtgtcctacagtcacctgctcccaccttccccactgtggtccgttctcagcccaacaagagtgatcctgttaaggtccacacaccctgccgctcctacgccgtgtcccccgaagccctcacgggcctgcatgtgccggctccagctcctccctgacctctgcctatggctctcgccctgctccctgggctttggccaagctctgctctttgtaagacaagcttctgccccagggcctttgcacttgctgtgctctctgcctggagctctttttccagagactctcatggccccctcacttctctccatcacccttcagtgaagccttcccacactacccacgatgaatttgcacactccatggcacttcttatcctcttcctttcctgctttatttttctccaggtatttactagtgtgcttctgtttcctccaccagactgtaagctctgtgagagggcaggaactatgttttgttcattgctgtgtccccagtgctgagaatagtgcctggcacataggcagtgctggggaatatctattaaatgaaggaatcttcctccaatgtgctcaggattgactgagaccttgggtgagagggcaggtccctgaactctgcagctcttagaatctgggaacagaattgagactctgggtctcaggaaggatcaagggacacaacgaaggcgaaaccaggccagtgagaacccatccatcagcctgaaggcaggcttggtctggggaaggtgaagtcagatggcctctgttatggggcaggctctggggttgggagccaaggactcttccttgcagaccattctgctctgcaggtgttcaaggtaaaaatgaaatacataatgccagaaagggatggctcgtgggccagctcccaggccagggccttctctgagcagagccctttgtgttctagaagccgagaaaatgggtcctacgttctcagctctgggtgaggggctgctcttcttctggggtgggtctaggctatcagggccctgccttatccctgaggcccagcaccttgctctctctttaattctcaggcttctccccagaaatgtagatgtgcagctctgagcatggcccaatgggctggggagtgaagtgtccagcccccatcacatgagcccacgctgggctatttcctctttttctttatacctccaaatcctgttgccccctctctcctggggaatataacccagactttgggaaggagtagtggttgtcagggcagcacgaagagcaggatcctgaaagcccaggtgagacatcaatggtttagaccaggaacatggcagtgaagatggaaagaggagctataggacttctgatgactatggaggctgagagagaagcctccacttgagactgactaccgtatttcttgtagtaaccactgagtagatggtggtgccctttatggggtgagaagggatggaggagggaagtgaaaaataggtctggggacagggagatcaaaacttgttggacatgtgacttttgagatgccaggccaagtggagatgttcagggagacatttggcaattggatagatgagcctggccctcagaggagaggcctgaggctgaatacactcttcagagttgtcagtgtatagatgcaatttagtgctatgggccaagatgggccatcttgggggagatggagaagaaagaaaagaaaaaggcatccaggactgatcccaggataccagcatttctagggcagacagacacactgctgcagaagagattgaggaggaatcgccagagaagcaggaagagacccagccaagtgtgaatcctggatgccaagagaagagaatgttcaaggaggaaggaggctcagcccggtgaggacaggcatgtggcacgtgcccattcaacagggccctgtgcaggtgactggtgactgatgggcgctgtttccatagtgatggaaccctgatggtatgggccaaaatgaggagtggaggtgcctgtgtaagcgttgtcctaagagactggctgtggaggaaagcagcacaaatcagggaagcagtgcctggagggagtgtgagctggagcagacaggtgtttgaactgagaagtcctcatgtgtgtttgctgcaaggaatgccttctagcaaggggcaggtgatgatgccaaggagagaaggggcagggggcaggagcaaagccctggggacctgcaggggcattgatgagaagaagacacttccctggtcatgataggaggaagagaggatgctggtttgggggtgggcagtggggaggattctctcagccccattccaggcctcttttcactattccaggccacctatgggcttgaggtcttcacccaccatgcatttgtgaatgactattttgaaaccagagtggaaaatttctgtacccagaaaatcacttagactcttggaaaagttgttactccataaagatgatccttcaagaaaaatctcctgtgttggtctagttagggtgactgtgctggccttctggatttcctctgaggactcaaaggacttcccagggaacactcactccggtcatcagagacaactgatgatgtgctgtgaaacccaagtcatggatggttaaaaaaaaatgtgaaaagcgaagtggaaagaaaaaagacatattgatcattgggcagactgagtgtctgagtatgctggacccagagccttccagagctctgagccctgtcagggaagatctctttgcctcgtattaaaatttaaaaggagactttttttcaagcgggtacagccttaggttcctgggtaggggggtctcgggcagcccctggtagtcccctgagagctacaacgaggatgtagcatcctctggtcctggacactgtctgcctggatcctggcctctgtttctgtcctggggaatcaggctgggctcccaggaggaagctggcttctctctgtctctctcctgtgggtaaagcagcttcttagagaacagaggcatatgtgctcgcttgccctctctctctctctgtgtgtgtgtgtgtgtgtgtgtgtgtgtctttcagtttttatcaaagttacacatgtctggagtttaaagagtcaaatatttccatagattttgttgtgggaaacagcagtactctttctctttgccccacattttctctctgcccaacccccacccacccaccggtcaccactcccagaagcagtacctttcatctcttttggcagattgtcttggtttgccatatctctacataatgtgcttgggttgcccatgacttggcttctcagcttcagcattatctgcaggctccaaagcctttgccattcgcattccacctccggccacctccctatcctctcattagtgttgtatcataaataattcacagccaagccataaagtaaaccatgattactttcctttcctgttttcactgtgtataatcattgtatgtatgtgtgcttaactgcactttgttttctatacatttgttactaattcaaccccagattcacgcctcacccaaatttcccctcaagacattggagatgttcagcagcacctgacgctctgtgcatcttgtcttgctgaggcaggggctccgctgagttgtctggtggctcctgactgccccggggctcccctctccatggtggtgcactctcatccagcgagctccctccacccactcccggaggtcctctctgcctcctgtgttgggtcttctctttccagaaccttgggtcttccttttccttggttttcatcctcatcttacagagaccatccttcagtgtggtcttcttcagagaagatgcatgagagggaaatactttgatccttcacatatctgaaaatgctggaaatgtctttattctattttgcagtagattgaaatctatcatagaattctggggtggaaatcattttccttcagtattgtcaagacattgctccattgccatctaacttcctgggttgctcttaaaagctccaagtccattctcagtcctgttgccttctttagggtcctgtcttaggatcttctctacaaccctagaacatgacgtctcacagtgatgggtcttggtgtgggtcagttttctcactcagtggctctttcagtctggtgaccctgggacttctgctttaagaaaatgtcttgagttctttgattatctcctctcctctgtttcttctctctctctggaactgctgttattcaggccttggccctcctatctgttttctctgattttcataccctctgtcacattttccattgctttgcctttttgctggattctctgagtacgtccctccatttttgtctccatccattctattgagttttttcttgttgttgttgttgttgttgtttgagatggagtcttgctctgttgccaagctggagtgcagtggcacgatctcggctcactgcagcctccacctcctagattcaagcaattctcctgcctcagcctcccgagtagctgggactacaggagcccgccaccatgccctgctaattttttgtattttgagtagagacagggtttcaccatgttagctaggctggtttcgatctccagacctcatgatctgccctcttcagcctcccaaggtggagtttttgatttctactgtcacattttcagttttcaagaatttttttttcttgaatgtccctttaatggcatcctgttcttgtttgatagactctactatcttatctctctaaggctattaacgttagttgttattaatgttacttggtgtttttggctttgttcttgttctgtttttaggtttttttcctgcgtggtttctgtttctctcaagtgcccctttattgtgtgtttatttggtctcgtttctcagacatctgatagcctttggtgtcttctcatgtttaagagtggaggggctcaaagatgattggaagtgatgagtgaggctctttgacggcgagttccccatagctgactgccggggctgtttcgtcggggagtcttcaacagtggtgcctttcttcttgagcagaatcaatccctatgaagactcagtctccctcttggttaaagggtctgcttcccatgttctggaagccgcaggaaaaagtcagggaggaggggaagaaggaggggtctctgcagccagtctgtatgcattgcattcacttcctccccactatttttttttttaatttttatctatttattttttttgagatggagtctctctatcgcccaggctggagtgcagtggcatgatcacagctcactgccacctccgcctcctgggttcaagaaattctcctgcctcagcctcctgagtagctgggattacaggtgcctgccaccatgcccagctaatttttgtatttttagtagagatgggatttcgccatgttggccaggctggtcttaaactcctgacttcaagtgatccgctcacttcagcctcccgaagtgctgggattacaagcataagccatgcgcccgacccccactatttctttatggcacccctgccatgccctcattgtgcctgacatcccccctcaaaagggctcagtttcaacttgtgcagagaagaaacctccaggctttctctggggtgggtggggggagagtctcctgagctgctggagttggggcggggatgggagtctgacagcttctaacaagactttccaccaatcgtccttaccttggttccctccaccccaacctgcagaggctttgagggatcctgggatgtaaatcagattggttcccagatttccctgctgcaggcttgggattctgtctcttccagtcattcatctctttccagcttccaaaagtttactgttagtctcctatcccattcccctcttccttgtaggtttattatacccaaaagaaaagaaagaaagaaagaaagagagagagagagagagagagagagagagagagagagagagaaagaaaggaaggaaggaaggaaggaaaagaaggaaagaaggaaagaaggaaggaaggaaggaaggaagggaagggaagggaggaaggagaaagagaggaaggaaggaagggaaggaaagggaaaagaaaaggaagaaagtttttcccactatctttaattaaagactgcctgtaaggtggtattcaaatatattttagccatgcagcccattcttccaaagaactcttcaagaaaggtcaccctctcagccccacccccagaccccaggagcctattggcacttccctgaacttctaggacttggaggcacaggtgggaacctgacagtgttgtagaaagtctttgggctttgaactgattcagagtcaaattctagcctcacttccagtaattactggccagttcctttgctctttgaaccttagtttcttcatctaaatagagataatgacacccgtttccagggtccttttgagaactaatagtaagataacatgggcttgtttatcccaggtccagcatacagaaagtatacaagtgttcagcaaagggagtcttccttcctccttcatagttctttccttccttccctcttctttcttccttgcctccactagcgtgattctgattttcttcaggctaaggtggtctttctgcccaaggaggagagagatgctgtctttgtgtgtctttggtggccatgtgtggacggcacatcatagaagagagaaaagtctgcaccaactctgtaaatgcattgacccatgcacagtaacaatgaaaactaaaatgcaaagtgaatatgggtcaggcatggtgcctcacacctgtaatcccagcactttgggagatcatggcaggtggatcccagcactttgggagaccatggcaggagtttgagaccagcctgggcaacgtggtaaagccttgtctctacaaaaaaaaaaaaaaaaattagctgggcatggtagtgtgtgcctatagtcccagctactcaggaggctgaggcaggagaattgcttgagcccaggaggtcaaggttgcagtaagccatgatcacatcactgcactccagcctgggtgacagtgataccctgtctcaaaaaaaaaaaagtgacatatggattgttggacagatggagtgtctgagaatggggttcagtgtgggtccacctgaattttcttagctgcaaatcacaagaacattttaccttttccatcttcgggcattgtttgaaatgaggtcttctgcagggagggaggtcatgtggtgtgagccgtggagctggagactttgtgtgaccctttctgggtcacagttttctcatttgcaattggaagatgtaagaatgaggcttgggctgtagagtctggaggactggggtttgagtcccagctgccattactagctctgcaattgctctttgtgagtttctcttccatgaaatgaatgattgccatgtggtttggatgaactatctctggcttgtccagatgtgaatgtgcagggtctttccagctctggaaacagcagagcttggcactaaatcctgggagctgctgctcagagagagtctaccgaaaaggcctgggtgagggagctatgcaggctccttcaagccttgtctccataaggaggaagctgatcttccttgaaggtcaaaggacctcatctgagcttgctgcaggatgcttcttattgggcaggaccgtggccgtgtaccctggtttgaggtgaggcatctgctgggaattctttccttccagagcccagagctgggtatcagcttgctggaacacctgcaggtgaggtgaggagcacaaaggagatgccaagtctccagagggtgctctggcctcagaggcctggatgagagagaaagcacctctctacccacagcctggagtctcttggaggaggggcctccgctgtggtgtatgaagaaaggagacccaacccagcagcttcagcagttccttgcagtccacggggtgaagtcctggccccgggaggcaatgaggtcctctgtgagtcggtgccagaggttttccagcctggccgcatcccaagggtgcatgaagctccagccacatcttccctgcttagtgtggctgagtgtctttccctgctctgtgggtggaggtgcttcttgggagtgctgggagtataaaatgaaatcagatgcatgaaacagttgcccagggcctggtactctgcccccaaccccgttgccagtcacagccaatgacctgcatccttgaagacctgccctctgagcatggcatgtgtcccagtttagcactaggtgacaacagcacacctgggttcaaatcctggccctgcgcctcacacaaaagttgtttaacctctctggctcagtcttctcatctagaaaatgagaataatcatagtgctgtgtctcaaagttgttgcagattaagtgaaatggcatttgtgtgtaatgtacttggcatgtagaaagttgacctctttttctgaattatcaatatttacttctctgattgcctcttcaggcaaataataaattccggatagtgccaccccctgcccccattacttttcagcagagtataaactctgaactggaccacctgcatgaaaatctagaatctctgagtggctgcctgagcataagttatgtaactgctctgtgccttggtttcccagtctgtaagatggagataacagtactgtgattatatcttagagggttggtatgagaattaaccaagatgctacctatgaagtactcacggtacgtggcacatagtaagtgcttcataaaactcagctgttattattagaaaagaatcctcagaaatcacttaatcgtaattcctcatttgccagtaaggaaactgtagcccagggaggcattaacatggcatgttaatgatggaagccagcatcttgacccccgcttagtatatgccaacaggaggaaggaagtaggaggcaacatgtgataagtgtacacaaaagcatgtgccatccttccatggctgtcttgatggcaaggagatggtgtggtggtgggatcaggttggaaacctaatgtgccttcggctcccttgcagagggatattcagccccagaggattccaagcaggttgagaggggcatccctccgtggagacagatcctgagcaaaggaggaaagtgtcctgccagggaggcctggggtggcctcggctataggaaatacacactgatgaattcaggggaaatggacattgggttgcaacttgctctcagatggttcaggataaaaatgttcctgtatgtttgtgatgtttctaaataaaaaccttaaatgataatacagcacgactcagaagaagggggaccagggaagccaggaattgagggaagactttaaaagagacagagggcattgggagccagccaggcagacttctggacaagtggagtctgctgaggccaggagaggtggtgaaaggccttggaccaaaggaggcagcggggccaaagctccaagcggaattttggatctgtgctatggatggggtcatctgttgacatgagtggctggcaggcccaagatggacaggcccagctgtcaagagagtcaagggaggtgtgtgctggggcccagcagccagcagaagacagagcagtcttggagtggggcagcatggagtgggacaggcttactgggcaggcaggctcccaagaatgtggtgacagctgacagggctgcacatgagagccaaaaagagcctacggcagccagggagaagccaggctatgggttaggccttgtgaccagctggcaggtgcagttggcagactgggccaaatgtggccagccagggggctggacaaagtttttagagactagagccaagggtaggctgggcacctcccctgcatccccagggaaagtgacaaggaatggaggcagctgacaagggcctggaggccgagggaagctcctctgcaatgtgagcattattcagcctgaatcccagggtggagtcttcaggggccatgttcccccaagagcaggccaggaggggtgcaggctgacacaaaaggaagaggagctaccctgtcacaaagaggaggagtcaagctcctacaaactttcagaatgtcagcagatctagcatctaggcttccccaaatcctcatctccccagggctcccctcagaagtttctggggctgtgtagctggcgagctcaggaccaggctctaagctctgtgattttcctgagggttgtagcttacgccagtctaaccatgagacacctggatgggaatcaagttctaggtccagagcaggaaggtccaggagtgaggaggtggctgggctccaacaggctctgcagataggactggccgtccagcatagggcatgctccaatgttcccaatgctgcctgggccggggggcatcatccctctcctgaggactcacagggaggaggtggggcacctgagaggccactccctcccctttcacttaggaggaaatgggggcccaggaaagaaataggtgcctcagttgccagagtgcccagttcaatcccagctctgccacttactgttcgctgggcacattcctccacctccgtgtagctccatttgttcgtctgtaagctgggagagaacagcgcctacctcactactgtgaggccactgtgaggcttgcagggcttgttttctcagtgcaagtgaggagccctcgctgggtgggggttctcgccatgcctcaccaagcgctggctgtgaatctctccccagtggcaaagccaaaccctggggtcaccgttgaaacaagatcttactctttgtcctttattctctttcttccccaaaaccactgggtcagctgacctgggtgcccggcacaccctctgtaatagatgggagaagtcaagccctctggggctgcccctctgccccccacccctggagagagacgaggctctgggccccacaggttgggttccctgcccatcactcctcaacctcaccaccccactccctgccatccccccaaaggtgactccaggctggttgcttccttccagagcctgcgccttcattccccaatgcctttgcacactctatccctctgtgcaggtgcccctaccccattttctacctagtaaactcttcaaagcccagtgcagtgttttcaccctctgggaaactgccctcatctccctccgcacccatacccacccctccatcagagtcaacctgcccacctctgtgtccctctgaacttgtgcattctgtcatcaaacacactgctgttttgttcagccagcagtttatccagccacctcctcccagggtgtcactccttaaaggcagggaccagagcggattggtcttggtccctaatacctagcacatgacacagatgccatagatagtttacttttcattcatcaaatattaattgggtgccaactgttgtaggtgttgggggtataacagtgaacaagcagatgaaaagcaagggaccttgaaccaccaaaacaatcttgcaagaggacaatgttgcagctctcacacttcctgatttcaaaacttactacaaaaatacagtaattgaaacagtgtggtactgacacaagacagaaatatagttcagtggaatacaacagagagcccagaaataaaccctagcaaatatggtcaaatgattttcagcaaggttgccaaggctattcaatggggaaagaaagtctttccaaggaatgatgcaaaagcagaatatccacatgcaaaaggtgaagttggactcataccttacaccatatacagaaatgaactcaaaatggatcaaagacctaaaggtgagagctaaaactataataaaactcttaggagaaaacataagggaagaacttcatgaaattggatttggcaatgatttcttggatacaacaccaagcataggcaacaaaagaaaaaatagataagtttggacttcatcaaaatttaaaacttttattcattaaaggacactatcaacagaatgaaaaggcaaccctgggaatgggagaaaatatttgcaaatcatatatttgataagggcttgatatccagaatatgtaaagaactcctacaactcaacaacaacaacctcaatccaaaaacccaattttaaaaatagccaaaaagcatgaatggacatttctccaaacaagatatacaaatggccaatcatcacatgaaaagacattcaacctcactaatcatgagggaaataaaagtccaaactacaatgagatactacttcacaccctctaggagggctattatcaaaaacatggaaaataagtgttgagaaggatgtggagaaattggaacctttgtacactgctggtgggagcgtgaaatggtgcagccgctgcgaaaaacggtatggtagttcttcaaaaatcacaaacatagaattaccatatgatctagcaattccacatccaagtacataccaccaataccgaaatcaggaactcagatatttgtacacctgtgttcagcagcattattcacaatagtcaaaagctggaagcaaccccagtgtccactgatggataaacagataaacaaaatacgttctagtcatgcaatgaaataccactcaaccttaacatggaaggacattctgatacctgccacatgtggatgaaccttgaggacaccatgctgcgtgaactaagccagtcacgaaaaaggacagatactgtatgatttcactgatatggggtacatagactagtcgtatccatagatagaaaggagagtggtggatgccaggtcttggaggaaggaggagatggggagtgagtgtttaacagatacaaagtttccgtttggaaaatggaaatttttctggagctggacagtcgtggagctggatggtggtaatggttgcacaacaatgtgaatgtacttaataccactgaactgcacacttaaaaatggttcagggcagttccaagatggccaaataggaacagctgtggtctgcagctcccagcgtgatcgacgcagaagacgggtgatttctgcatttccaactgaggtacctggttcatctcattgggactggttggagagtgggtgcagcccatggagggcgagctgaagcagggcagggcatcgcctcacccgggaagtgcaaggggtcaggggatttccctttcctagccaagggaagccatgacagactgtacgtggaaaatcggaacactgccgcccaaatattgtgcttttccaatggtcttagcaaacggcacaccaggacattatattctgcgcctggctcagcaggtcccatgcccacagagccttgctcactgctaatgcagcagtctgagatcaacctgcaaggcagcagcctggcagggggaggggcatccaccattgctgaggcttgagtaggtaaacaaagcaactggggaagctcaaactgggtggagtccacaacagttcagcaaggcctgttgcctctgtagattccacctctgggggcagggcatagctgaacaaaaggcagcagaaacttctgcagacttaagcgtccctgtctgacagctctgaagagagcagtggttctcccagcatggtgtttgagctccgagaacagacagactgcctcctcaagtgggttcttgacccccgtgtagcctaactgggagacacctcccagtaggggccgactatcacctcatacaggcgggtgtccctctgggatgaagcttccagaggtaggatcaggcagcaatatttgctgttctgcagcctctgctggtaatacccaggcagacagggtctggagtggacctccagcaaactccaacagacctgcagctgagggacctgactgttagaaggaaaactaacaaacagaaaggaatagcatcaacatcaacaaaaaggacatcaacaccacaaccccatctgtacatcaccatcatcaaagaccaaaggtagataaaacaacaaagatggggaaaagccagagtagaaaagctgaaaattctaaagatcagagtgcctcttctcctccaaaggatcgcagctccttgccagcaaaggaaaaaagctggatggagaataactttgacaagctgacagaagtaagcttcagaaggtcggtaataacaaacttctctgagctaaaggagaatgttcgaacccatcgcaaggaagctaaaaaccttgaaaaaagattagacgaatggctaactaggataaacagtgtagagaagaccttaaatgacctgttggagctgaaaaccatggcacaagaactacgtgacgcatgcacaagcttcaatagccaatggaagaaagggtatcagtgattgaagatcaaattaatgaaaaaagtgagaagagcagtttagagaaaaaagagtaaaaagaaatgaacaaagcctccaaaaaatatgggactatgtgaaaagaccaaatctacatttgattggtgtacttgaaagtgacagggagaatggaaacaagttggaaaacactcttcaggatattatccaggagaacttccccaacctagcaaggcagggccaacattcaaattcaggaaatacagagaacaccacaaagatactccttgaaaagagcaaccccaagacacacaatttgataattcaccaagcttgaaatgaaggaaaaaatattaagggcagccagagagaaaggtcaggttacccgcaaagggaagcctatcagactaacagtggatctctcggcagaaaccctacaagccagaagagagtgggggccaatattcaacattcttaaagaaaagaattttcaacccagaatttcatatccaaaccaaacttcataagtgaaggagaaataaaatcctttacagacaagcaaatgctgagagattttttcaccaccaggactgccttacaagagctcctgaaggaagcactaaacatggaaaggaacaaccagtaccagccactgcaaaaacatgccagattgtaaagaccatcgatgctaggaagaaactgcatcaactaacaggcaaaataaccagctaatatcataatgacaggatcaaattcacacataacaatattaaccttaaatgtaaatgggctaaatgccccaattaaaagacacagactgtcaatttggataaagagtcaagacccatcagtgtgctgtattcaggagaccaatctcatgtgcagagacacacataggctcaaaataaagggatgaaggaagatctaccaagtaaatggaaagcgaaaaaaaagcaggggttgcaatcctagtctctgataaaacagactttaaaccaacaaagatcaaaagagacaaagaaggccattacataatggtaaagggatcaattcaacaagaagagctaactatcctaaatatatatgcacccaatacaggagcaaccagattcataaagcaagtccttagagacctacaaagagacttagactccctcacaataataatgagagactttaactccccactgtcaatactagacagatcaacaatacagaaggttaacaaggatatccaggacgtgaactcaggtctgcaccaagcggacctaatagacatctacagaactctccatcccaaatcaacagcatatacattcttctcagcaccacatagcacttattccaaaattgaccacatagttggaagtaaagcactcctcagcaaatgtaaaagaacagaaatcacaacaaactgcctctcagaccacagtgcaatcaaattagaactcagcattaagaaactcactcaatgattgccattctaactggtgtgagttcagggatctagaactagaaataccatttgacccagccatcccattactgggtatatacccaaaggactataaatcatgctgctataaagacacatgcacacgtatgtttattgtagcattattcacaatagcaaagacttggaaccaacccaaatgtccaacaatgatagactggattaagaaaatgtggcacatatacaccatggaatactatgcagccataaaaaatgatgagttcatgtcctttgtagggacatggatgaaattggaaatcatcattctcagtaaactattgcaagaacaaaaaaccaaacaccgcatattctcactcataggtgggaattgaacaatgagaatacatggacacaggaaagggaacatcacactctggggactgttgtggggtggggggaggggggagggatagcattgggagatatacctaatgctagatgacgagttagtgggtgcaacgcaccagcatggcacatgtatacatatgtaactaacctgcacgttgtgcacatgtaccctaaaacttaaagtataataataatgaaaaaataaataaataaataaactcattcaaaaccgcacaactacatggaaattgaacaacctgctcctgaatgactactgcataaataacgaaatgaaggcagaaataaagatgttatttgaaaccaatgagaacaaagacacaatgtaccaggacctctgggacacatttaaagcagtgtgtagagggaaatttatagcactaaatgcctacaagagaaagcagaaaagatctaaaatcgacaccctaacatcacaattaaaagaactagagaagcaagagcaaacaaattcaaaagctagcagaaggcaagaaatagctaagatcagagcagaactgaaagagatagagacacacaaaaactcttcagaaaaaatcaatgaatccaggacctggtgtttttaaaagatcaacaaaattgatagaccattagcaagactcctaaagaagaaaaaagagaagaatcaaatagacgcaataaaaaatgataaaggggatatcaccactgatcccacagaaaaacaaactaccatcagagaatactataaacatctctatgcaaataaactagaaaatctagaagaaatggataaattcctggacacatacaccctcccaagactaaaccaggaagaaactgaatctctgaagagaccaataacaggctctgaaattgaggcaataattaatagcctaccaaccaaaaacagtccaggaccagatggattcacagcccaattctaccagaggtacaaagaggagctggaaccactgcttcttaaacgattccaagcaatagaaaaagaaggaatcctccctaactcattctatgagaccaacatcatcctgataccaaagcctggaagagacacaacaaaaaaaaagagaattttagaccaatatccctgatgaacatcgatgtaaaaatcctcaataaaatactggcaaactgaatccagcagcacatcaaaaagcttatccaccacgatcaacgtggcttcatccctgggacgcaaggatggttcaacatacacaaatcaataaatataatccatcacataaacagaaccatcgacaaaaaccacatgattatctcaatagatgcagaaaaggccttcaacaaaattcaacagcacttcatgctaaaaactctcaataaactaggtattgatggaacatatctcaaaataataagagctatttatgacaaacccacagccaatatcatacagaataggcaaaaactggaagcattccctttgaaaactggcacaagacagggatgccctctctcaccactcctattcaacatagtgttggaagttctggccagggcaatcaggcaagagaaagaaataaagggtattcaattagaaaaagaggaagtcaaattgtccctgtttgcagatgacatggttgtatatttagaaaaccccatcatctcagcccaaaatctccttaagctgataagcaacttcagcaaagtctcaggatacaacatcaatgtgcaaaaatcacaagcattcctatacaccaataacagacaaacagagagccaaatcatgagtgaactcccattcacaattgctacaaagagaataaaatacctaggaatccaacctacaagggatgtgaaggacctcttcaaggagacctacaaagaaaccactgctcaatgaaataaaacaggacacaaacaaatggaagaccatttcatgctcatggataggaagaatcaatattgtgaaaatggccatactgcccaaggtaatttatagattcaatgccatccccatcaagctaccaatgactttcttcacagaattggaaaaaactaaagttcatatagaaccaaaaaaaagcccgcactgccaagtcaatcctaagcaaaaagaacaaagctggaggcatcacactacctgacttcaaagtatactacaaggctacggtaaccaaaacagcatggtactagtactaaaacagaaatatagaccaatggagcagaacagaagcctcagaaataacaccacacatctacaaccatctgatctttgacaaacatgacaaaaacaagaaatggggaaaggattcccttttttaataaatggtgctgggaaaactggctagccctatgtagaaagctgaaactggatcccttccttacaccttatacaaaaattaattcaagatggattaaagacttaaatgttagacttaaaaccataaaaaccctagaagaaaacctaggcaataccattcaggacataggcatgggcaaggacttcatgtctaaaacaccaaaagcaatggcaacaaaagccaaaatagacaaatgggatctaattaaactaaagagcttctgcacggcaaaagaaactaccatcagagtgaacaggcaacctacaaaattggagaaaatttttacaatctaccaatctgacaaagggctaacatccagaatctacaaagaacttaaacaaatttacaagaaaaaaacaaacaaccccatcaaaaagtgggcaaacaatatgaacagacacttctcaaaagaagacatttatgcagccaacagacacatgagaaaatgctcatcatcactggtcatcagagaaatgcaaatcaaaaccacaatgagataccatctcacaccagttagaatggctatcattaaaaagtgaggaaacaacagatgctggagaggatgtggagaaataggaacacttttacactgttggtgggggtgtaaactagttcaaccattgtggaagagagtgtggtaattcctcaaagatctagaattagaaataccatttgatccaggaatcccattactgggtatatacccaaaggattataaatcatgctactataaagacacatgcacacatatgtttattgtggcattattcacaatagcaaagacttggaaccaactcaaatgcccatcaatgatagactggattaagaaaatgtggcacatatacaccatggaatactatgtacccatagaaaaggatgagttcatgtcctttgtggggacatggatgcagctggaaaccatcattctgagcaaactatcacaaggacagagaacgaaataccgcatgttctcactcataggtgggaattgaacaatgaacacattggacacaggatggggaacatcacaccccggggcctgttggggggtggggggcagggggagggatagcattagggatagcattaccttatgtaaatgactagttaatgggtgcagcaaaccagcatggcacatgtatacttatgtaacaaacctgcacttagtgtacatgtaccctagaacttaaagtataataaaataaaataaaataaaataatgagttggaaaataaaaagtttcaagggctgggcgcagtggtgcacacctgtaatcccagcactttgggaggctgaggtggggtggatcacctgaggtcaggagttcgagaccagcctggccaacatggtaaaaccccgtctttactaaaaatacaaaaaattggccagcatggtggcacacacctgtaataccagctacccaggaggctgaggcaggagaatcacttgaacctgggaggtggaggttgcaatgagccgatatcgggccactatactccagcctgggcaacaagagcaaaactcggtctcaaaaaaaaaacaaacccaaaatggttcaagtggtacattttaggttgtgtatttgttaccacaattttaaaaagagttgcttaaaaaagtgcagtatgagcagcttggagcccagacagacacacaaagctgaggttgcagagcacctggaggaagctggcaggacaggatgaaggcaggagtggctgggagccaagagcgcaggcatgtggtcatgggcaagttacttaatgcccctgtgaatccctttctcatctgcagggtggggagagtgatcgctaccacagcatgtgtcattctaaggactgcatggtgcttgggacatgtcaatgctcaacacacacatacacacattagcttgtctgagtcctgcagcccagttctggcacctcctggactgctttgcacatgaggccattgaatgggagggtcacagaaggctcagaaagcacctctgaggacctggcattcgagctgaggtctgaggattggggcagttaacaaaggcatggggatggaaggggagggaggattgttccatctggaggaactggcagggtcaaaggtcggaggctggacagagcattagcaccgtgcaggaaaggggtgctagggaggctggagtgggggatggccagagaggaggggaagcagtgggcagcctgggaggggcctgggagcccatggtcaggtggaaggtgtccgtggagtgtggaggaaaggatatctgcttcttttccatcaaatggaagaggccacatcactcatctcacttttgtgaggggagagtggcaatgaatacatgaaaattattgtcaattattgtaaattataaatgctctgtgggcttttttaaataaatccccaaagcctggtattgctataactctgccacatggttggccctaacgcctggcccagcaggagtctgtgctggtccccaggtccctccagagtgccggaggctgccttggccccaggccacctcctcgggctcctcgctctaccagccaagccattccctcggtggatcccaagcatccctgcctctgtgcctttgctcctgccatcccctccacctgcagggccatttccccttcttcatcttcaaagcccaggccaggcacccccattccctggagcctccctggccctccccaaccctgccactgcctgcttgtcaacagctatccttccaaacccccagaccgactgattattttcccttagcttgacttttactattttctgtttgcttcaggcaaactatgcttcttctgctggccatcttttgagcccacaggcagggaaggtacagttaataaaatccgtagatgctttaaaacatggaagtttaaatccgcaagcctgggcaggatgatcttcagtgtgatatggtgtcacctcctactagctgtgtggctgagggcaagtcactgtgcctctcttagctcagtgtccacatctgcagaatagggacagctctctctacctcacagggctgtcatgaaaagccaggagactagaggacacttcagcacctcccaccactcccgatgagcactgcgtagatctgcagtcagtgtgagcaagtgctgttctctttctgtcatttggaatgactgcatctgggcttgattctagtcacagggctgcctcctggctgatggcttctctgaaaggcactacacgtgctttaagtagtatttgcaagtgacactgcatccaggccgggccagtgctgctggagagctgcctacaagctttctggagacaatgcattgatccatttctttactgggcaccaggcctgatgcagggaggcatgtaaggagtgagtggtcatctgtagcaaggccacacccagttacatcagccctgcttcaagaagcagaagtctaggtttgtagtcttggctctgctgccaatggctgtgtgaccttgggcaaggcctttgtctgctctggtcatcagccaatttgctgactctacaaggcctcacagcttcaggagatgagcacaggtccctccacacctgggggctcctcacttagaaacttcctggcatgtctgttctgagaatgatgccaggtcctctggacagctgcatctgttctgtctcgggaacccttctctgtcagctctgagcctgctgagaagagcactccttgcttttctgtgccctgaatttcccactctcaggccatgaagggagctgattcgagcacagattggggtagagagaggcagctcctgggagacttgagccccccgccttctccactacagtcctcactttgcacactcaggagggacctcgaacaacttcacctctggggaccactggttgaggtgcagcacgtggtccccagggactgagcctgttccagctgtagtcacccgccctgctgcccaccctccaccccatctgcagtcactgttgactgaaggacttacatgctccaggcacagaagtaagcactaaactcagaggggccatggtcactcaggttgtaaggagcagagctgggattcacactcagccgtgtttggcttcaaagcctgtgtcctttccttcacacctcactgccattaactgggagccctactttctgcattttccaactgtcagctttctgcatggcaaggctctggtgagaccctgttactgttcctctctgtgactagggccaggactggaatgtccagtgaatgctgaggatggtagtggtggtggtggtggtggtgatggtggtgatggtggtggtggtggtggtggtgatggtagtggtggtggtggcagtggtgatggtggtgatggtagtggtattggtggtggtggtggtggtggtgatggtggtgatggtggtggtggtggctgtggcaggggtggtagtggtggtgatggtggtgatggtggtggtgatggtagtggtggtgatggtggtggtggtggtgatggtgatggtggtggtggtggtgatggtagtgatggtgatggtggtggtggtgatggtagtggtgatggtagcgatggtggtagtggtggtgatgctggtggtagtggtgttggtggtggtggtgatggtagcaatggtggtagaggtggtggtggtggtgattgtagcgatggtggtggtattggtggtagtggtattggtggtggtggtggtagtggtggtggtggtgatggtggcgatgatggtggtggtgatagtggtgatggtggcgatggtagcgatggtggtagaggtggtgatggtggtggtggtagtgatggtggtggtagtggtggtagtggtattggtggtggtggtgatggtagcgatggtggtggtggcgatagtggtggtggtggtgttggtgatggtggtaatggtagcgatggtggtagaggtggtgttggtggtgatggtggtagtggtgatcatggtagtggtggtggtggtgatggtagcgatggtacaggtggtgatgttggtggtggtggtagtgatggtggtggtagtggtagtgatagtggtggtggtggtggtggtggtgatggtggtggtacaggtggtgatagtggtggtggtgatggtggtggtagaggtggtgatggtggtagtggtgatgatggtagtggtggtggtggtgatggtagcgatggtagaggtggtgatgttggtggtggtggtagtgatggtggtggtagtggtattggtggtggtggtggtggtagtggtggtggtggtgatggtagcgatggtggtggcggtgatagtggtggtggtggtgatggtagcgatggtggtagaggtggtgatggtggtggtggtagtagtgatggtggtggtagaggtggtggtggtggtggtggtcatggtggtggtagaggtggtgatggtggtgctcctgccacggtggtggtagaggtgatggtggtggtgctgatgctggtggtagaggtggtagtggtggtggtgatcatggtggtggtagaggtggtgatagtggtggtggtgatggtggtggtacaggtggtgctggtggtggtggtggtgatggtggtggtagaggtggtgatggtggtggtggtggtcatggtggtggtagaggtggtagtggtggtggtggtgatggtggtggtagaggtggtagtggtggtggtgatggtggtggtagaggtggtagtggtggtggtggtggtgatggtggtggtagagctgctgatggtgcgtgctggtcggtcatgcgtggtggcagaggtggtagtggtggtggtgctcatggtggtggtacagctggtagtggtggtggtcatggtgctggtacaggctggtagtggtggtggtggtggtggtggtggtggtggtagtnnnnnnnnnnnnnnnnnnnnnnnnnnnnnnnnnnnnnnnnnnnnnnnnnnnnnnnnnnnnnnnnnnnnnnnnnnnnnnnnnnnnnnnnnnnnnnnnnnnnnnnnnnnnnnnnnnnnnnnnnnnnnnnnnnnnnnnnnnnnnnnnnnnnnnnnnnnnnnnnnnnnnnnnnnnnnnnnnnnnnnnnnnnnnnnnnnnnnnnnnnnnnnnnnnnnnnnnnnnnnnnnnnnnnnnnnnnnnnnnnnnnnnnnnnnnnnnnnnnnnnnnnnnnnnnnnnnnnnnnnnnnnnnnnnnnnnnnnnnnnnnnnnnnnnnnnnnnnnnnnnnnnnnnnnnnnnnnnnnnnnnnnnnnnnnnnnnnnnnnnnnnnnnnnnnnnnnnnnnnnnnnnnnnnnnnnnnnnnnnnnnnnnnnnnnnnnnnnnnnnnnnnnnnnnnnnnnnnnnnnnnnnnnntccttcaaagagggggattggtgcccttcttttcctgcccactggttgtgtgacctcaggcaagtgactttacctctctgaacctccatttcctcactttgaaaaagaggactgacataacccccctcactggtttctagtaaggatgaggaggtcctggagtgaggagaatgcactgtagtgctagaggatcacagatgttcgtttgtgttcttgcggctgctgctgtctatcccatgcagaaaatggctgagcagtgtggggtccagttagccacgaggtacaggcataccttggggctggagagacgttcctcttcatcttgatcataaaggtggcatggtgctctgatcaataaaggtgttgcttcctactccaacagaagataaagacgaccctttggtggctgtgtcaggacctgtaaaatcctttatggcttgcagcaccaggaggagcccttatgactggaatgaacaacagcaaggccaccagctccaagatatgaaggcctgaggagaacagcatgacaaagactgagcaggagattggaccattgtaggaggtgctgatcccagtcaacgaaaaactttcaacacggcgaagaagcatctccacttcccctgcgcttacattggaggagaccaaagagccacgtctatagcagcctccacctcatttccctattctgatcttgctttctcgtttccagcatctgggttgtggtcaggttcactgtgcagctctcaagagggtctagccccagtctcaatatggatacaccaggaaggacctaaataaggagcccccaggtgttgaggggtctatgctcaccccctggagctatgaggccttgtagagtcagtgaggtggctggagaccagagagggcaagggcctgggcctaggttacacagccagttacccacatgtgactgggaagagacaaagtgttctctgctaactggttaccacctcctttaatctctgacaagttttcatagaaatggctttcctgagggatagccgggccagcagtgacaactctcacagtctgatctttacatacaagctctggaagcttttcagaaccacatttttcaccctgcctacctccgtgaaaaccatctgtccatctgtcatgctaagaactgcccaaaccattaagtactttgaactgaagggaagatgagacaggatcagcaggcaggagcaggagctgaatcacgccagctcgtggctgtgccttgactcctcgaccccactttctgctggtgaggacactaatttggcccccactttgagtggtcagacatttaaggcagcgggtaggtgaggggctacttacagatctatagtgcgcatggtccagcctaccatctcaccaagggattcctgcttcatgtttgtcaagtgcagataagcaaacccctttattcttcatcttggagtttcttctaaacatgtcacccattttgcgcctccgttatcccgatagaaacctaacagttaggttaactttcctgaggcttttattgccccctgcgtattgttaatctggaccatgatcctgcatcccactgatagccattttaaaagtggaagagtggttcaagctccgtgtcatacggatcatgtgtcataggaggaactgaagcctgctcttcagcactgtattcagtgtcaaagtttggaagctgaaatgcttcacattccatgttggcggctctgtcttcatccctggaatttgttccctgccatcatccccttgcactgcctctgcctctgcaggatactgtggctctgtgacgatgtttctgtctgcatcctctctttcctctacatcctcgtcaccttcatcatcttcctcttcctcatgctgctcctcttctacttcatcggaatattgaccttcctggggacaagactctcatcaggagagatgggcacaaaggaatcttctctgtgaggagcttcctgcgcctcggaccccatcctggcatgagtgtggtcatttccatcatcctccagcgggggggtcctgggaagttcatggtccccttggctgtgatcttggagagcttccaagggcttctgtatccccatcagcatgttatggattcctccgcaaacctggccatggctggagagaaggaggagatggtagagagactccatcgtgacttcttactccatcaactggtcccaatattgccagggctagacagttgagccagcctcttagcacgaaaccattagcttcgcttttgaggtgggtgagggagacatctccaggcttctgaacctattgaaatctggggcacttggttttccttccactattgaagaatgaatctgactgtaatgagtgctatcaaggcagagtgccagatacagcaaatactgattgagccccactcggtgctaggcactcttccaagcacataacctatattaactaagtaaaatgtgcaacacctcttggagcatatgctattattttgtagtaattttctaattgaaacagatcatacatacaaaaaacaatccaagtcataagtatacaaccatgagttattacagagtgaacatacctatggaattgtgcccagttacccacaggtcaagaaataggacattatccctattttacagatgaagaaactgaggcacagagaggttaagtaacctgcccaaggtcacacagctaataagggacagaggctggtttccgcctcaggagttctgtctggtaagcccagctctgttttctactgcccatagaaaaggtggacctggagagcatgacccatctcagggtcaggggaagcttctgagaagctggggttggatctgagctcaggggagaactggagcttcatcagaaagagggaaggagagcattccaggcagggtgatctgctgagaggcctgcagatctgctgtggggattcaggagggaggcgatgtggacagcctgtcacggccacaacacacagactcaccagtcactggagggcagccatggggctcacaaagggattcttccttccacaaaagggctcacaacaggcatccctaaatagctcgctgcaaggaaaacccactttgagttgggaaagtcacatttccatagagtggattagagaaatagggctttcattggaagaggtggctcagtctgagaataacagctgggaggtgtaatagtaaaaccatcccacagccacagccatagctggtctcctctgggcagcatcagcacaccctccatgggcgggtgcttgctcaggatcacacagctggtcggaggaggcaggatttgaactcggcagtctgatgcatcaacaccccatgcctaaccactgcactcgcagcgtcctaatcagacaggccacctcagtcctctgagccgtgaccacaccctcccttccttcctgttttcccacccactcacctactggctgtttatgtctggagcaccagtgtggttgcagtgtccatttagagtccagctaaacccactggacctggagtccagcccagctcctaccattagaatctattttgccccagacttacattgtcatttaatctgggcttgaatactagacctgttggggagctcactaccattcaggcttgcttttttccaagtttgtagccctggggtcagaaaactctttcttaaagggagcccggatcttcctccatgcctggttctgccttttggctgagctacctcccaggaggctgagacagtggtcacagatatgacctgaggtgtccaaagacaggttttccttggtccctgtttctcctgtaatcttaactggtggggaacagatctgcttggggtatggggtaagaaggtgcctgttgtcatgcagaaattagaatgccttctctatccgtctcctttccagattggagtaactctggggtctgagcatgtatcctcccccacgccccaacccagtgttcttcaggtttaatctgtaaggacagctgcaagagatgccaaccaactgccttcatgagccctggctaccttgccccattcagatagatcaaaaactgtttcacggccttcatggtgctgacaccttgagctcattgcaggatttaaaactgttcacagccttttcttacctaatgtgtacctcagcatatgtgtgtttctgtgcagccaggaacaccgaggtctcaggttgtagtagcccagcgttggccaggcacctggtgtacgcatagtgtcagctgctactagagagagccttggtcagtgtcctctctggctgctgccccgcacagccccaatggggggcttccagctgcagctccgcaggtcccacctctgacagtacacctttcctttcctctccttcaccacctgtaagacgctggctgaattttagagccgggcactgaggcttttctaagccagtctccaactggcctttctgcctcaatacctgctattcgtactcagcactgtcatcatagaattgtaccaaggtttctacgatataatttctgtaaaaagtgcctactacagagtcagcacttaacaaattgtagctgtttatttttatgtgatgaaaggtttcacctatgaccctggttgactttttttagcggtttttagcaaaaataataatgagaagaagaagtgttcataaatgttaaccaagaagaaaggagatatcctacggaaagcgtgtggcacatagcgagggcctggtcactgtgaggtcaggtggtctggggaggcctcagccctcccagctctggccatttgtgtggtgtggagcaccagacaggctcccgcctcttcagggtctagttagtgacttccccattctgggtctgggacataagggagtgaggctggaatagtggaaagaggagaccatggtcctgcatcggcctgggctaggtccagccccacctgagggcttctgtgctctgggccattctgggagaagatggacagtttggggagaatttctcacatgtggaattgtttgaggacatggaaatgctgagactggaggaaagaagtctcgagcagcatcatggcttttggagacttgtgtgaaggaggagctggactgcccagagctcagagcatgggtgtgagcacaggttgacaacttcagcttaatagtgagagagctgcccagaagtcgcaggagctgctgggaaactgtgagtcccctggtgccggaggaatatgcacctgtgggagggtgtggacgggatccacctgaaaatggcctaatccaaggatgcagcaggcttctctgcatcagaggttttaaggaacttccaagcatgaatgttctctaacagtaattttcaaattgtttttacattcacataactcctttttacaaagttcagtttacatacatactcactctgaaaaccaacgcaatccagagctgctgtgggtgggggaggaggacccagggccccactgctcggcttccccacccccatgccccatgaatccggagcacagattggaagtcactgttctagaaccctgcaggccagggctgctcatggctggagcaactccacctaatgttcgcagtgaaggcatccactcctctgacagtttcatttcatttcaacccagcttctgggttcctgcctgcctccctaaccccactatctggtcagaaatggggtatcggctgtgtttgacagacccaagctggcttcagcccaggcttggtgcctgcttgctggctcttaggcctctgctcttcgtcacccagaagtcactccacaggacctccacctatcatatccaattctgtagaataaaggcgtttgctattcttagagctgtgctgggcattagacccctgagctgctgccatcttcccagctgctgccactgggagctgatgttttcctagtattaaaaaaatcacaatagtaaaacccaggaaatggtgaaaatgccactgtaggtagcaagcctgcaaaatgacaagagcttgcctcatcagcaagaatccttctggaaggtgtataagaaggcatccttgacccactctcccctcttatttctgtcgggccactgctgaactgtctcatatctaggtcctctttcctcttgccctcgcctctgtccagctgggctctctacagtcacaatagcctctcctggcctccagacctccccacccacaccatcctccacactgcactcaggcggagactcataaaacaggagtctcaggtctgaccctgtgcacccaaaaagtctcagacaaaggtgtttcttctgcagaagccacctgacacccacccccactggttcctcctctcatcatccgtagcactttgctcattgtctgtattactgtttccatctctttgctttacgatcttttaagtgcctgttagtcacacttgagaccaaggtcagggttttatttagctttatatttctggccctggcccagcgccaggctcagaccagaccttaggaaatactgttgagtaaattcacatgcttgcagctcacgtcgctgtttagaacagagactgtgctggtgggctctgtgcctgcgtgccgtggaattcctggcacagtggcctgtccctgagggtgcacctaatggcccccagcctgagcgttatgacatgatgtagtttctgcagaaccccaacaaaaggagaatctggggtgtacccagaaaccagtgtgaactttccccatgacccacatggcctccccagtttactttccaccaggggatgtgtctactacctcttggccactgaatatttttaagagagacacagctcagcaggctgtaccacctggcactttcctctctttccacagacatccattcttctgtgagtttcactcgaagagcagcgtgtcactgcggacaagccagccagctcaccatggctggacctcccagggtaccagacctctgggaactggccctgagcctcacttcacggacacaggctgcccgccaaagtgggtctcagagcaacagtgtgtgcattgctcgtcacatcttcctcttgctttgcatgactgactacacccaagaagtgtgccccctgggaggaaagcatatttggcaaccagatcataataaaatcagaaatgcagcaaacctttaaaatatccagacttggaagagatgcaagagttttctaattaaatatgaataataggtggaaaagtcataatataaatgcagaatagcttaatacatagaatctcagattaagaaggtaacttggaggccattgagttcatcccttcatttcagaaaataatgcagcttggtggagagaaaagtcacgggcttgaaggtcagacatgcccctattgactagctatatgaccttggggaaattactttgagccagaagtttagctccaggctggatccgcctcttgtattttatttgacttacacagtgttttttaaaaaacagaattgcacagcagttaagcacatgaaccttgtagccaggtgacctgagttcaaattctgactccattaactggctgtgtgaccttgggcaggttatttaacctctctgggactgttttctcctgtgtaaatgggaatcatgacagccccatcacatagggctgtcatgtgatttaatgaggtaatgcatgtaaagcatttaaaatcgtgcttggcacccagtgtaagagtttgctaatatttttagtttttttttaaaaatctgaatctgtggtttcattgaaaaaactggaagatgtaacaacttcatgtgacatttggcaggacaggaatagccactgccccttcagagagggatatgccctgcctcccaggtcaccacagtccccaccgcgtcccctcctacgcctcccctgctttgcttgatcatgttgccagcccatccccctctagtgccctgagcctccacttggtcttaggagtaaatatagccacttatatttactggaacaaatatgctaaactaaatatatccaagtgaactaaatatatccactttacaatgttatgacactcatacacaagctaatccacccaaagccgctctgtcggtgtgctggacgtgtcctgagcacgtagacgtcatgaattccctcccactagctaggagtagtagaataatgctattctacctactacctactactagaagacctcatagcctattcatctggtctctaggtggacagtgctagtgacggggagcccactgcatggcagagcagcttctttccatcttttgttatattcagagtccgggaacaacaacctcctccatcaccttgcctgaaatgccatgcaatttccaccacaacccctctttgacatcttgagcagaggaacgtgtcacgtcctttgggggctctgtgccgagttcctttgtgcttagcagaagctgtgggtctgctacaacccaagatatcatgtgctgatggttcacaggcagctcagtatcaccagccatggggattgcaggagaagttgccgggggcaggagaggacatcacactagatcatactgtgctgctcttcagggcacacaagtcagatctggggtccagtccttgcgtcaccacttttgagctgccttgtgactttgggcaagacactcaacctctctgtttctgcttccttctgtattcagtgaagattgtaagaccctcctgatcaaggggttgtttaaggatctttttcttttcctttgagtccatgagtcttagagccacagcataagaatgaaaagatccatccatgaagaccctggtctcgccatacccctccccatagcctctgtcctgccctgaccccaggcatgggcagaaagctgcttccagacactgggagaaattactccataagtcagccctgccagacccaccagcagtggaccgtcttgcagcctcagaacaggcagggaagttggtcacttgctcccctgataaagggcagcctgtggcgtaggcctccaaagggctgccttgggtggaggagggaagaggccagcagaccaggcaagcaggactatatccccagggacccccatcatggtgttccggtttcccaccctggctcttccccggcatttctctacagctgtcaacacctggggttccaccccagcgctggctggaagggctgggcggggagtgatgccattcttatttgtctgcagtgtaacaggtccctgggagagggaagatgctaacaaaaccttggtcggcatcatctaaaagtgtttagatgatgtgcgggaacagggtgctgcgtggtaaaattgctggctgggtggtcttggccatgtcaatgaacccactgggccttggttcccttttctatacaatggggacgatggtaaaatggttgatgggaggatcgagtgatgcccgccatgtgacggtgctctgccgtgtctcaggttatgaggactatttccgaaggaaagaaagtgacttgcccaaggtcacctggcgagttccaacaagagcagaaccaagacccaagtgtcctgcccacctctcccgctctgagcagagtcactcctctcagaaggtgggcagcgtatgcgcccatcaaggttctgaggcactgcctgtgtcccgcctcctttgggagcccagcattgagttaaacttgtgctcaggaactcctggagtgggaaagtcaaggctagaatctgaggatcacaggccccaggaaagaaggcctcgctggtctctctgatgtgcagctaatgaatatgtattgggcacctgctggggatgtcctgacaaatgaggtagatgtggtcctcacccgcgcagggatgatgggggctgtgcttgtgaaaaggccattgcagtacacacagtctgacaagtgccctggagcagaagtgggtgagatccccaggtccagaggaggggtgtgggacaggcctccgaaggacaggaccttggtgcaaatttctggtagagtggaggagctggtcttacaggagagggggtggtgctggggcagggatgcaaggctccaggtgacctttggcatggctggagggggagtgcagcaggaaatggggggatcagtgggaattggagggagatgagctggggaggtggcaagggcagatggtgccctgggcctttcctgccaaggaatgcagggcttcgctccgatggtagtgggagaagcatgaagtgggacctctaggctggaaggagtggtaagcctggatggatttggggacagctcctactggctgttttgtgaagaaaggaggcagtggtataggagagagggtggtggccagggctggtggggacagagaggtggcacccttggagcatgcattgcatgtagcattgatggttgtggtggtggattgattatggagcatgaaggaaatggagccatcaaggatgaagcccagcctgtgggctggccagccacacgagtgcaggtgctgcttgctgagagagacggggacccaggagcagacactgcaggtagagggacttggaaggctggttctgggcacgcaaggtatgaggtgcctgaaaaccaccagaggtgatactaaggcagttagatgtatagcaaaggcatcggaactcgagagagaagtggctgggggccatcagcacccaggtggagggtcacctggggaaggtgtgtggtgagaagagtgcaggtcggaggctggcaggggccatgtcggcatgggaaagggtgggcaaaaaaggagcttgcaaaggagacacaagcaggagggaatgaggtgcctccagaaggccagcaagagggcggacaggatgaggcaaatggactttcaatggagcaagctgtgaccttggcaagaacagttggtcatcagagctgggctgcagcggctcaaaagcatagagtggggaggaggtgtggacagccctctccagatccgggctgtgcaggaaagagggacagcagagctggcccgggatttgggcccagggaggcttggggctggttgatttgtgatgggaagagagctgggcttgtgtctgtggtggtggaaggggctaggagagggaggcaatgacactgctgggaagctgtgggagaggacagtgggtggggtgggctctggcaccgcaggaggagctggacccagagcccggcaggtctacctcaggcttggggaggtccacagtgatagacagctgccataggcctgtccctggctggaccctctgggaacctcaaacctggacaagcctcggtcctggccttcaacgagcagaggagccacaggttccaggtcgttgaaccaggactgccctctttcaagtcctgggtcctcagcagccgtcttcctcaagctctctgggatgtccagccatgggcccctcctcctctaaaccctctcctcttggctaagccacagttctctcccagtttcctgcttctctgacctttctctttttgagggcagggtttggggtgccatttgttctgcccacccttgaatttgggtgccacccaggtctctgccgtcggcactaccctcttctgtcttgtggggtcatcctcctcccaaatctacatatccccttctcagtcccactgatttctgacacaaggacgtttcttcatgtcttcctcatgggcatctcatactcaatgcttaaagactagagtcctccatcacttccccccaagctcgggggtggtgccactagagccaagttgaaacttctggatcttggtttctccttcgttctgacccctgccccatccaaatggccactgaggcctgtggagcctatgcccagaaggcatctcaaatcgctgttctagaacatgagcctgggcctggattcattctctcctcctccaggccattcccatggccagggaatatcctctcttagagactttatatttctctttaaggcttttatcaatcccaaacttagcatggtgttcaaggccaatggtgatccagcctgcctttcctccagcctcatctcctctctgcaaccaaatactccaggctctcaacactctgccgttgctccggggggtgcctacccaagtcctcccttctctcctgtcctccatctcttctgtcctcccttctctcctgtgctccatctctcctgtcctctatctcccctgtcctcccttctctcctgtcctccatctcccctgtcctccatctctcctgttctcccttctctcctgtcctctatctctccggtcctccatctctcctgtcctcccttcgctcctgtcctcccttctctcctgtcctccatctctcctgtcctccctttgctcctgtcctcccttctctcccatcctccatctctcctgtcctcccttcgctcctgtcctcccttctctcccattctccatctctcctgtcctccatctctcctgtcatccctggcctcacccaacccaggctcctccctcgtgttccccagcaggctacactccctccctgatgtgacaaggtgctgcacgtggttgtgtacaccccgccccaagtcaaggcaccaaccttgaaggctcagagtcctctctctccctccccttcctatctctctctctccatttggaaagaccatgtaccatttaagcttgatgtggaggaggaaatgaaggggtcggagagcagctggggcagatggaccctggcacctgcttctaggttggctggcacacaggcccagtagacgtcagagtggctgtgggcctgtgtggggatcagcagggtgaaggctaggctgaaggacaccattaggctgaaggacaccattgcaggtggtggcgggaggggagcaagtgccatggacccgacaagcaaggccaggtgaaggctagtgtccaggaggttgcggggcttccagtgcaaaggggagaccaagctgtcctcactctgtcttcttctagctgggaaagggggccccatctcagccatcttccctggccaccaggtcccaggggcatggagggacatgggaattaagatccaggtgtgagcaactggttttggtcttggagatctgctacgtgagggtgagccgctgtcacatcgaggcagatgcctcgtgcttggccacagagtgcccttcctaagagaaccgagtcatttctgcgtaccgccgccacggccttcagttcgtcctctcggacgcaaggtggcgcgtgtcctggatcccgtggaaaggtgacccccactggggacacggccaaaactggctggtcagggcagccatggtggagaaggggcagttttagactccttggcggcatcagttggccaaatctgaggtgacaaaaaaacagggtccacctgtactggtggacagcagtccatgtgtgaggtgagggtgagtgtgccaggagagtgtatgagcgtgagtgtggtctgagtgtgcaagtgagtctaagtgtgtggtgtgtgtgcatgggtgtgagcgtgtgtgactgtgagcgtgttagggtggggggtgcatgtccgtgtggtgggggggtgttggtgtgtgggtttgattgtgggagtatgcatcagtgggagtgtgaggatgtaagtgtgactgtgggggtgactgtgaatgtgggggtgtgtggggtgtgtgattgtggggttatgtgtgtgtatgagtgtgtggggatgtggaagtgagtctgggggtgtgtgtggatggttgtgagggtggcgtgtgtatgtgtaaatatggggtatatgagtattcaagtggagatgcaagtgtggttgtgggagtgtgtaggggcgtgagtgtggggtgtgtgagggtgtggggggtgtggggtgagtgatgtgagtgtatgtatgtgtatgaaggtggggacgtatgtgtgagggtggggtgtggggggaggagagtcgggtgtgtgagggtaggggtgtcagcataagtgtgaggatggggtgtggagtatgtgagtatggggtgtgagtttggggggagtgtgagggtgtggggtgtgagcatgtgtgagggtgtgtgtgagggtgtggggtatgagcatgtgtgtggagggtgagcatgtgagggtgagcgtgtgagtgtgggggtgtcagcatgtgtgaatgtgagggtgtggggaggtgtgagcatgtgtgatggtgagggtgtgtcagtggggggtgtgagcatgtgtgagtgtgaaggtaagtgtgagtgggggtgtgagcatgtgtgagggtgagggtgtgagtatgggtgtaagcatgtgagtgtgagggtggggtgtgagcatgtgtgagggtgagggtgtgtgtgagggtgagttgtgtgagggcgtgtgggggtgtgagcatgtgtgagggtgtggggtgaggatgtgtgtgagtgtgagggtgagggtgnnnnnnnnnnnnnnnnnnnnnnnnnnnnnnnnnnnnnnnnnnnnnnnnnnnnnnnnnnnnnnntgtgagtgtgagggtgagggtgggggtgtgagcatgtgtgagggagagtgtgaggtcagtggtgtgagtgtgagggcagggtatgtgaagtgtgaaggtgagtgtgagggtgggggtgtggaatgtgagcatgaaggtgagtgtgagggcgggggtgtgcgaaggtgtgagggcggggtgtggagtgaaggtgtgagggtggaagtgtggagtgtgtgaaggtgagtgtaagggcaggggtgtgtgaaagtgtgaaggcaaggtgtggagtgtgaaggtgagtgtgagggtgggggtgtggagtgtgtgaaggtgagtgtgaggatggagtatgtgagggtgtgtgaggatgagtgtgagggtgggctgtgagtctgagggtgaacgtgagggcaggggtgtgagtgtgaaggtgaggatgggggtgtgcagtgtgtgaaggtgagtgtgagggtggggtgtgagtgtgagggtgtgtgagggtggggtgtgtgagggtggggtgtgtgagggtggggtgtgtgagggtggggtgtgagtcagggtgaatgtgagggcaggggtgtgagtgtgaaggtgagtgagggtgggggtgtggagtgtgtgaaggtgagggtggggtgtgtgtgagggtgggatgtgagtctgagggtgtgagggcaagggtgtgtgaaggtgagggtgggcgtgtggactgtgtgaaggtgagtgtaagggcggggtgtggagtgtgagggcgagtgtgagtgtgggggtgtggagtgtgaaggtgagtgtgagggtgagtgtgggggtgtatgtgagggtgtgtgagggtggaggggtgtgagggtgagtgtgtgagggtgtgagggtggagtgtgaaggtgtgagggcaggggtgtgtgaaggtgagggtggggatgtggagtgtgagggcaagtgtgagtgtaggggtgtggagtatgaaggtgagggtaagggtgtgagggtggggtgtgagtgtgaaggtgtgagggcaagggtatgagtgtgaaggtaagtgaggatgggggtgtggagtgtgaatgtgaaggtgagtgtgagggcggggtgtggagtgtgagtgcgggagtgtggagtgtgaaggtgaatgcaagggtgtggggtgcatgtgtgagggtgaccatgtgagggcaggggtgtgtgtgtgagggtgagcatgagggtggggtgtgagtgtgaatgtgtgacgacaggggtgtgagggtgagggtggggaagtggattgtgaatgtgaaggtgagtgggagggtagggtgtagagtgtgagaacgagtgtgagtgcaggagtgtggagtgtgaaggtgaatgcgagggtgtagggtgcatgtgtgagggtgagcatgtgagggtgggggtgtgtgagggtgagcatgagggtgggatgtgtgaatgtgtgagaacaggggtgtgtgagggtggggatgtggagtgcgagtgtgagggtggggagtagagtgtgcgaatgagtgtgagtgcttgagtgtggagtgtgaaagagtgtgagggtgtgggggtgtatacgtgagggtgagcatgtgagggcgggggtgtgtgagtgtgtgtgagggtggtgtgtgagtatgaaggtgagtgtgaggacaggggtgtgagggtgagggtggggtgtggagtgtgagtgaaggtgagtgtgagggcagggtgtggagtgtgagtgcgagtgtgagtgcaggggtgtggagtgtgaaggtgagtgtgaaggtgggatgtgtgtgtgagtgcaggggtgtgaagtgtgagggtgtgagggtgtatgtgagggtgtgtgagggtgagcatgtgagggtgtgtgtgtgtgaggtgagtgtgtgagggtgagtgtgtgagggtgagcatgtgtgggagtgggagtgaaggtgagtgggtgtgtgggtgtgtgagagcatgagcatgtgagggtgtgtgagggtgtgtgtgaggaagagggtgtgtgagggtgagtgtgggtgtgtgggtgtgtgtgaggatgagcatgtgagggtgtgtgtgaggaagagggtgtgtgagggtggggggtgagtgtgggggtgtaagcgagtgtgagtgcaggggtgtggagtgtgaaggtgagtgtgaggatgagtggggtgtgagcatgtgtgagggtgagcatgtgagggtgtgtgtggagatatgagcatgttttagtgtgagagtgagcttgtgaggctgtgtgtgagcgtgttagggtgagtgtgtgaacgggtgtgagggagtgtgggggggtgtatgtgtgagggtgagcgtgtgagggtgtgtgttagggtgagtgtgagggtgagtgtggggatgtgagcacgttttagggtgagtgtgtgagggtgtgtgtgagggtgagtgtgcgtgagggtgagtgtgggggtgcgagcaggtatgagggggagtgtgagtgtgggggtgtgagggtgtgtgtgagggtgaaggtgggggtgggagcaggtgtaagggtgtgagtgtgggggtgtatgtgtgagggtgtgtgagggtgagggtgagtgtgggggtgtaagcatgtgtgagggcaagtgtgacggcaggggtgtggagtgtgaaggtgagtgtgaaggtgagtgtgggggtgtgagcatgtgtgtgagggtgagcgtatgagggtgagtgtgagggtgagtgtgggggtgtgggcatgtgtgagtgtgagggcgagcgtgtgagggtgagtgtgagggtgagtgtggggtgtgagcatgttttagtatgagggtgagcgtgtgagggtgagtgtgtgtgagggtgagcgtgtgagggtgagtgtgtgggtgtgagcatgtgtgagggcgagtgtgagggtgggggtgtggtggtggtggttctgttgctgccagcgggctctctccctcaagtcccctcttccaagcccttccttcccaagtcctttcagctgtaagctgatggccccattggagcagggtggagcccccccgccccgacacgctgtcccttgctcacctcctcccagccacctcctgcccctctgtgctggaaccaggcaggggcaggtggtgcggcgtgagtatgtgagggcaactcgctggcgttggaaggtgcgccccacaggttgagaagccacgcctcctccacgtgccgtgccagtggcctctcaggcttcaggagtcagaaggctcttctcctggaattatgccagggtcccctctcctggcgcgccccctgccaccctccccaccgcatctgagacttgcacatgtatagcattagaccaacaagacagcttcatcgtgatcctgttgcgcatgtgggactcgtgagtttccttctaagtggaaataagagcattctgattcgtgcttcaggcgcagcttctgaaagctggtggcacttccagatagaaccccaagcgatgtggcaggtggctgggaccctgcatcctgcagagcttgcaggctgacgtgcaggtgagggggagagctcaggactcctcattccaaactctgaagccagggaagcaatggtggtccctgttccttctcctcccatgaatatcaaggcggcttcctggcagactggacaggctttggggcaggcaggttcaaagcctgattctggccccttctggctatgggatcttggacaagtctctcactgtctctaaatctcggggtctcacaggctctccatggtgaggtggttgtgctttgatttgggtaaagtgcctggcagagtgagcacttggtgaatggcggctgcccgagctgctgctgctgttttattatcatcattccctctctgggactctggtggcctgcggtggctgttctttgtgggcgaagctgtagctgggctggctgtgccaaggaggctgtctggcaccctgcagctccacatcccctcagtgggaagcgccagtgtctgctgctctggaggaggaagaatagtgcagccccccgtctgagggggaggggcgcaggggtccgcagtggatcaccagggtgactcagttcctcccactctcgtggtcctctctggttccgtggcctccattccttgcgtctgtaacgggctggatgaatctaggaagcgcgtgcgtcttctgaggtgggaacctgcctcttctccttttttttccctttactatgacgcctgttgctcataggtacaaatcaaacgaagagtatgtatatgtgcgaggccgcggccgagggaaatatgtttgtgaggagtgtggaattcgctgcaagaagcccagcatgctgaagaaacacatccgcacccacactgacgtccggccctatgtgtgcaagcactgtcactttgcttttaaaaccaaaggtaagagagagtcagctggggcactgcccctgcccgctgcagggagctcccctctgggagtcccagcacagagttcaggtgcccagacctctttgcagggggcctggagcagccccatttcctgggttcccacccagcttggtgcccagtggcagagcagctggctccagactggcctgtggctccccatggctgcccccagccatcctcctggaacacacacacagcccctgcacctgtggccacccggccctggcctgcccagcctggtgcggcactcttgctcaccgttcatggttttgcatcttctctcatctcccctcccttctgcatgtctcctgagccgtttatccactgatctgagacactccagcatccatgctcgtcactgccactcttgcatttggaaatccattccactcccagctgcttaacacactcgcatgctctcttctcctgccagagcgcgccgacctccacccacctctccactcccaccatgcccctgctccacccagcttctctgcacctctcagcacagggccagccccccactcccagactgacagccctgtcacccctgccccagccacaccccacatcagggtcaggataggctctggcagtcactggtgaaaggaggggcctgctgtgaaaggcatgcatcccagagagctgtgatgggtgatgggcatggcctggcctgccacagccacccaggccaggcccctggtgtggacaaaggagctgagtccatgagattcttggattgcactctcctactgcaggataggcagggaaggtcctggcagcttgctcactgcagactgaagcgccttggagggagacccagggctctcggcaccccagtgtcttcagcctctggagcttgatagattcctgggtcagggtttggacatcagggtcctgtcttctcctttgagcaagttgggggcttctgggagccccacggtttctcagggggtgaaactcaagggcatccttcagctgtgccacctgttgacctttcttctgttggcaaagttgctcccagcaagcgaggctgggcagctgctctggagggggcccagcagggtccctacccttcttcacttcctccgtgctcttgctgcttggccccttccgttctctctataccaggtcaggggccagtttatcacatcccctgggagagtggcctcttctctgactgtgttcccatttctggtctcctcaccccattaactgaacccctgccctcctctgtcccctcgccatcatctgcaagttgagctcaaattttcctgtcaaggttttggtttaaacagaggtgcctgccctcccactgcctttcccccatcctcttctctcttggtgtctcataaacaatgtcccaaaggttgcccagagagggcacattggcccaggactccccacccaccccatgggtgcttcgaaggtgtcttccatccctgcagccctgcccagcatgcgtcgccctggacatgggctgtccctgacacgccctccaaccgcacttcctctggccttctgcagccagtcgagattttatggaagagcaagacggggataactgactgacaattcaatggacggtcttcaactctaaaagcggaaaacttatcacccaagtccccttgaaggtgaagaaagtgatcccagaaaacagaataactgttaatgctggagctgtaactagaacacgggccccgagctccagggcatcaccccatcatcttcctttctgtgagcagttagttccctcccttccctggagtgggtggcaaaaagctgcacttggagtggcctgtgtccaggggaccacactgccagcccagggccaagcagagcacacctgtgccccacacgcagcctgggctgcccatcgcctcaggaaaccatcactctgccgcgtgagactggaagtttccagcccaagcagtttcccacagggggcccactcaattccctttgccttgggtccctagcaggagcccgtactttctaggagatgccttcattggaagccacactgagcctgtctgcagtcccttcctgggtctctctgagccagcacagagccagggccctggagggctttggagggtccagagggcgtaatctgaacagaggggctgtaggccctccccatttccaggggtgtagagcatcccccgaggtaaggctgcccctgctgtcctgaaggccagggctgtgaggccgtgctctcaaccagtgatcaagcagtgccctgagctcttcctcaactgttcacaggggcttctagaagactagaaccttccagaaccaacgaagggagcagatgggaaatggtggaatctgaaactgtttgactaatagagggaaggccaggttgggatggtggcaatggaagcagggaagtctccctgttaactctctctgcagtatgggggtgaagggagagcagggcgctggagctcctgtctgtttctggggccaggtgtctttgtggagtgctgggccccgtcagccatcagctcagacaacacaggccccttgtctccggggctgtgtgcctccccattgggccacctccaggcctgccccaggcagccctcccgaccctaccacccggctacaccagggcctggggagcccctcctgccttcctgtctgtctctgtctgccgtgtgtgtctcgtctcttgtgtcagacgtcgtggcagcagctcaggcctctggaaactggctaaggaatgcgtcagtaggtggggctggggaggcctgtgggtggccctgtggtggctgggggtcccatttcctcttctcagatggttcccagaggccagcggatggctgtgccatgtccaggcccttgcaccgatcgcctcaggggacagagatggcctcaggtctgccagcggcaggggcagggacagagcggttgatcaaagccaaatgaggcaggcagggttgttggtggatgcccttttatcggaggttccgcctcttcccgacacccatcactttacctctcacttgcctttcctcttcattccaggcctgtcaggctttggtggggtctgggatgactgtgagaagctgtggctctgcctgacaagctgaggccctggccctcaacagggaagtggtgttcaggctgtgcctgcagccgtgtgccccaccttcccctttcacagaggaggagacaggcctggagaggggaagtcacagagggacccggacagcactcagggctgcccatccagtgtccactcctggacccgcaaagtcacctccgatcctgactcctccctgcacccccgtggcgggggcagaggagaggcaggcctatggggggctccctggtgccttctcctgagaaaggtaaaaccatttcaccaaaagcatcatcttagcatctcttcctccacacccagcatggtgcgtggcagagcccctgggctgctcaatagagtgactcacatggggacaggggtctgttctctgccaggcacactctgctgccactctacttgtgtcacctcatcaagtcctcccgcatccccacgaggtaggtattacttcacggttgcagaaaccagggctcagaaggttgaggaacttgcccaagagcccacagctggcaagtggcagagcccacagtcaaacccaaggctgccaggttccatctaggttccattctgcctccacatggagtgggaaaggcccccagagtcttgagacctgggtctagatggaactcggcaccaaccagcactgtgactgtggaccacttgattcactgtgttggttcaagcagccctgccagcatccaagacagccagtgatcttgtctaatggtgccatcagcacctgggcccagagtcagatcagaagcagggagaacctcagcctggcgggggttgaattacatggactttgaagctccttccaacattttcctcctgcgatgacaagggcatttcccatacatggctattgtacacccattgtgtgcccagcgtctagcttggttcattagagacctaaaccttccaggcagaacaggtgcaacaagtgaggtaatagccagaatgagcagtgtccacagtgctctgtggcctggggtagtcagggtagggtgggcctggctccacgaccttaggacagtgggtatctctgatccgcggaagaccccagctgccttttcccacctcttgactgtcctactctggctttgccttctcatgacaatgagggccgaagtccacaaggttggatagggacctctgaggaccctctggctacaagatgactctgaaatttatggctttgctcccactatggccaggagtaggacatccagatttatttccggttgtaggaggaaaacccaaattgggaaggatagagtcatgaactaggaccaaggtgaagaaagaggaaaggaaacagctcccctcccatccctgctgcccttgacttggacacctcagggaatcccagcttaagggtcccccattaacctcttagcaaaaccctaaatatttcttctaattctaggaatgattaagaagcacccttcagttcatccatgggccctctccctggtcacctatccatccatctcatctaattgttttcctgttcatttatctgctcatcctatctgttcctaccattctcccatttgtcctcccacccatccaacttcccattctttcatccttctgtctgtactctcatgcatgtaatagtgcatgtatccattcatccatccaaccagccattcttccattcttccattcatccacgtctctgtcctcccatccagctctccatcatctcatctgtttattgacccattctccatctatccttccatttgttttcatctactcacctatcctccgtctgcctattcatctccttatctgctcatctagcgttccatccttctgtctatcctcttcctgttcttcattctctttatatttcctttatccactttatctatccacgcaccaatcgctctattcatccactccaggaggcttagctctttccattcttctctcctccatccatccattcaaacttaccaattcattagactaatgggacagagcacctgactcagggaacttatgacttatgatgttaatgaccatatggaaatatagccatccccagggcaacagtgagcacatcacggtttgggagtagctgctgggcccaaaggaatatcctgaggcatctggcctgtgttcttctggggcaggctgggatgctctgcctgtccttcctagaacgctcctgtccacagagctgtgtggcctgtgaaatgttgtgcacctgttggggaactgaagctgttgctactgttccctgattccacagagctgctgcctccactcttcagcttgtgggctggacctacaacttggggcaaagtcagcctcccctctgagggctttgtaggcatggagcaggacagaggccttgcccaggccttccctgaaccaccctggtcctgtgtctgcactgtagattggcctggggaaactgaaggcccagaaatgggacttctctatggaaaccaagcttgggcccccagccttgtggctcctgagtccctggctagtagacttccctactctcaccttctgccctctcgccatgcctaatattaaatttgccctggtttctctacctacactttagaattctgccctgtgagctgccctagaggtgtcctcagccagaagggcatgctcagtcctcacccgtcatgccggtcaatgggagcctcccacgtcatcccacacttgagatggccaatagtcctgcctgatgagtgtcaccagctactagggccagacttaaatcagaagcaaaaaaaaaaaaaaaaacctattgcacttgagttgtcttttaatttcttttttgtttgttttttaaccagcatctcacttcctcattatactgtctgtcccctcacagccctcgcccaccccacctagctgctgtgcactgccctgaacagcagctgtggctacacttctgggcctgagcaccggggcagagggataccccagctcctgcccagccctgcagctggcagggccttgactggcctgagaaaccatggcctgccggccaggtgctacctccatgagccctgggtccgccctggcctcctgccccatagcagagcctaagtattctcgtttctttctagggaatctgactaagcacatgaagtcgaaggcccacagcaaaaagtgccaagagacaggggtgctggaggagctggaagccgaagaaggtaacaattgccaaccttctccgtcccctttccccttgtccgctttccctatcctcctccacctttcctgcttgccttccctgcttcctttctgtctgctttgccccattccccctcctcccctctctccctccaatagcttcaccttcagttctcccaattatcagacaaaggttaaattccctgaatgatcgagccacctccccacatgctgataggatatgctctgcagccctagctatcatgcattaccatctgccatgcaggtggagcgcctggcacccatgggtgctcagtgaatgtttactgaataaatgcacacaagagaacttacagccaacgttgattgagtgcccactatgtgtcaggcgggttctaaatgcatgccctgaattatcccagccaacccctcatagtgacactgtgggacacatactctccgaagctccacacccacactcctgcctacacactctggcatgggcctgacacatgggccttttggagctaggagagtttcaaaaaagcccaaaccagacctgacagccgcttgtcacctcccagccccatccccgtacacaccccggccatggtggtcaatccccaggaggcatcttagagtcagtctctgagaagacagggcagaggagtcgaagccagtgggtctggctgagcactgcccagcctcagcagtcaggcaggtggccagaggggctttggtggtggacggcagtccctccaacagaaggaggctggagccatctcgccagcaccaagcaaagcaggaagcatactgattccctgaaatcagccccaggacttagagtgtgacagagaggagtgtgtatgcacgcactgtgtgtcttgttctgtttttgtttttccaatttggggatgtatttgtggtcttacaaaaaagagttaagtcatatttccttttaggtggaataagtcatttttatagaggagaacacagtgaacttggggctgttcccccccaaagctagaatggggttcactatgcttgtcaaggatacactgggccatatgcacatgttgtctcattgagtcctcaaaacaggtggcagaaacttgtgtcactcatgttaagtcagggaagtcaaagctcagacaggtaaaaatagcccaaggtcacacaaaaaccctggctgcatgccagtccactgcctggtgggctggaccaggggagcctgaacctaagccagagccctcccctgaggtccctgccctgccccagcctcattttcccagtggagcaaacgaggatgctcagagccacttttcggaggacgaaatccatgcattcattccagaagtaattactgggcacagtctctgtgcctggctctgttctgggtgctgggggttccgcaataaataaaacagctcctgccctcaggcagtcggcatggcaggggagctgggcaaggaacgatggtggagtagagcaggggccctgcctgtgaagccaaagagaaagcagaagagccaagtgagggctggggcccgtggggagggccgctgtgctagacagggcggtgtgagcagagaacccacccggaggaaccggggtcaggagccacgtggggtcagggaggagctctcctgcagagggagcagcaggtgtggggtccccgggggccacggcgcttggcccgcgtgctggagcccgctggacgcgggggcagccggttcagagagagctagagcctgagggctgaagggcatgggggggtgccctggagcggaggagagaggcagggcgtcctctggcctgtgccgtgggcgcggggagcacgggtgtgctcaggaggtggaaaagcggcgggattctggggaggttccggagggagagcccacaggctcagatgaccccatatggggcagaagagagggggaagaacgaaaaggagccatggaggactccaaggattacggcccaagagactgaaggatggagtttccacttcccgcgacgagacagatgccggggggagcggcaggagttcgtgtctgtgggacgcgaggtggcgcgtgggagaactgcctggaaggagccaggcgccccggccctgcccatggtgctggccaggctgggcgctagcgccaccgtgtggcctctcccagcggcgcccgccgcgcgctcaagctctctcatttgtggagcgttggcctggatcccagcaggggcggggccgctcctgcaagggccctgggaaggggccgcccagccagaggcattccctcagcgccctgcaggaacgcagatgtggaggccccggccagccccgagctgggcaggggactcttggcttccagcattcatgcactgagtgcccaggacgggccattacccccactgggtctcaacttccacattagtaaagaggatctttaggagccctccctgctggacatcaggagacgctggtcctgactctccttcactcctaacactacccctgtgaccttcatctgcaaaatgctgacaatcccaccccagctacctgcctgctgagactggggggacagggtatcatgggatgacaggagctgaagtttattgggtacttactgtgtgccagaccctcacagtcctctgaacagcttcctagagtgcttttattgctacccagtttacagatgaggaaaccagacacacagaaagtaaagtatccaacgtcacacagcaaggaagtggtagtgctgagattcaaacccgaccattccctgcttcttagtgcagcacatcatttttaaactgtcagcgtaataatgcaagggctgtaaaccttagttctgactcagccaccagctctcactgggtcatctgtgcctggattttgctgtatgtaaatgaggggcagggccaggtgaacaggtgttgaattaggcccctcccaaagtcctaggcaagggaggtaaatgcctggggcataactacaaagttcacccccatccccagccctgctctcatcctaatccttcattcctcctctggtctcatcaccctgcctctagcctcaggggcctccttttgcctgccagccccagctccaccccatagcttttgacctacatccggctgaatgcccacttttgtccactttggacatctgactgctgcatattgagtgacttggaagtgctagttccgggctttctggccccggggcagctgggcatggttgagagccaaagcctagctgccccagcggcctgagtcagtttctgtgccagccctcctggtcaggtgggtgcagtactgatatgtgtgagcgatggggctggctggccagctcaacccacctgtcagcaacctcactctgcagaccagaaacaggttccaatggtctagtgatgggccagcgaacaggccagatgttagcggagctctccccagcgtccggattgctgtccatttcagagatgcccaaactagactcctgacatgttagaggtgacccgactggttggggtcatcccagaggaatcagaccaggaggctagtattccagagccctaacccccacttttagactctattcaataactctgtcattattcttatagtctgtttaaggagtgcaagtgacctaaatgtccaacaatatctgaaacaagtatcacaattttgttttttgtttactcttgtgaacaattgcttccaagtcactcaacatgcagcagtcagatgtccaaagtggacaaaagtgggcattcagccacatgtaggtcgaaaactatggggtggagctggggctggcaggcaatgggagggccccgaggctagaggcagcctggacttcaaaagggcagtggctcctcagataagagcgtggctgggatggggacctgctctgcagcctgaggccagcttagtcaagccgcccacagaggccagagtccgccacctgccagatgccattgtgccagccaccgggagcctggtcaccgtggcagatgtgtgtgtacactgaccacggatggctctgtgctgctggaccagccagtgtgactgccctgtcctggaataacagatttcatcattaatgtattaatatggtagctataattatttttaagccctcaatatgtgccaggccttcattttagtcctcctagaaaacctggtgaggtgagaccatcacattcattcgacaaagggggagaccaagcagagcaaggtggtaagttgcccatggtgaagccagcactgagatgctagtgaaacaaacaaacaaacaaacaaacaaacaaagactgtcttctttgctatggctcaatcccagccctactgctgtcttccatgggcaagttacttactttctcttacctcagtttcctcatctgtaacatgaggatgagaacagtaccagcttcacaggattctctgaggtctaaatgaataaatatacctaaagctctcagaactgaacattgcacattctaggcataagggaattattgttcattattatttacaaagcgctcccatatctgttacgtttcttggttgtcccaacaatcttgtgcccttgcgatggctattttgcccagtcagcaggcaaggaaactggggctcagagaggagcagccgtgtgggcagtggggccaaggcccaactgtgaccttgggtcttctgtgtttgccctcaggaaccagtgacgacctgttccaggactcggaaggacgagagggttcagaggctgtggaggagcaccagttttcggacctggaggactcggactcagactcagacctggacgaagacgaggatgaggatgaggaggagagccaggatgagctgtccagaccatcctcagaggcgcccccgcctggcccaccacatgcactgcgggcagactcctcacccatcctgggccctcagcccccagatgcccccgcctctggcacggaggctacacgaggcagctcggtctcggaagctgagcgcctgacagccagcagctgctccatgtccagccagagcatgccgggcctcccctggctgggaccggcccctctgggctctgtggagaaagacacaggctcagccttgagctacaagcctgtgtccccaagaagaccgtggtccccaagcaaagaagcaggcagccgtccaccactagcccgcaaacactcgctaaccaaaaacgactcatctccccagcgatgctccccggcccgagaaccacaggcctcagccccaagcccacctggcctgcacgtggacccaggaaggggcatgggccctctcccttgtgggtctccaagacttcagctgtctcctctcaccctctgccccctgggaagagaactggcccctcgagcacatgtgctctccaaactcgagggtaccaccgacccaggcctccccagatactcgcccaccaggagatggtctccaggtcaggccgagtcaccaccacggtcagcgccgccagggaagtgggccttggctgggccgggcagcccctcagcgggggagcatggcccaggcttggggctggccccacgggttctcttcccgcccgcgcctctacctcacaagctcctcagcagaagcccagagacctgcgcctccccgtgggtgagttcctgcccctggtggctgggccgcttctcccctgtgggtgcaggggttgcaagttcacaccctcctgggtatcacacctggaactaaacagctctgccagctcagtagttattaataatttagcaaacatttattaggcacctactgtgccatgcaccatgctggctgccctaaatcagctggcttattaaactttattttagcctcagaagcacagagcatggactctggagttcatgggaaatgggttctaccacgtattagtccgttcttgtattgctataaacaaattcctgagactgggtaatttataatgaaaagaggttgaataggctcacagttcttcaggctgtacaggaagcgtggtgccagcatctgctcggcttctggggaggcctcaagcagcttttactcatggcagaaggcaaagcgggaacaggcatctcacatggcagagtggaagcaagagagagagttgggggaaaggtgccacacgctcaaaatgccagatctcatgagaaatcactatctggaggacagtatcaggccctgagggatccgtccccatgacccaaacacctcccaccaggcccacctctaacactggggtttacaattcaacacgagatttgggcggggacaaatatccaaacgatatcatatcacttgcaaggggtgtggccttggatgaggttgtaaatactcgtgcaattccccatcccccaccccatccccatctgcctgtgttctttgagcagatggcacaacttaaccaaaaccatcaccatctccaatatcactgtcaccagtgctctcagagacaccacaaccaatatcatccttgtcaaccatcagcactatccccatggccagcaccaccactgtcaccattgcaccaacacaccactgctgccaccccatgagcacagtcaccatccctgtcccctcagctgccatgacccctccactgatagcaccatcattgtcagctgacccccttccgacaccttctctgtccccgtgttgccatgacccagccctgtcactcctggaggaacactgatctaggaatctttccttgatttttaattttgggttcacattcaaattcctggaggtagcagaagggcaaagagcctcaggtgggaactcatgtccaagagtgaagctgggtgaagaccattttaggaacaggacaggcagcagacccacatagaggccaggctcatgggtgacaacagggccccacgtcgctcaagtatcccctcctttgaagacagatatgctggctagaggcatggagaccatggggcctgagcatactcatggtcactgtcgagctggagatggcccattccagagatggcagctggctcagcatctgtgggcagggagtcaggaacttggttctgggctcagctcagccgggaccctggactcgctctgtgatcttgggcgagtccccctcccacttccaggcctcggctccccatgtgcccagcatgtaaccttcaccttaccttgtcttgttttctgaccccagcagaaggccgagtcccgaagtccctcctgctcacccggccctgctcatcctctctcctcccgacccttctccgccctccatgacttccacggccacatcctggcccggacagaggagaacatcttcagccacctgcctctgcactcccagcacttgacccgtgccccatgtcccttgattcccatcggtgggatccagatggtgcaggcccggccaggagcccaccccaccctgctgccagggcccaccgcagcctgggtcagtggcttctccgggggtggcagcgacctgacaggggcccgggaggcccaggagcgaggccgctggagtcccactgagagctcgtcagcctccgtgtcgcctgtggctaaggtctccaaattcacactctcctcagagctggagggcggggactaccccaaggagagggagaggaccggcggaggcccgggcaggcctcctgactggacaccccatgggaccggggcacctgcagagcccacacccacgcacagcccctgcaccccacccgacaccttgccccggccgccccagggacgccgggcagcgcagtcctggagcccccgcttggagtccccgcgtgcaccggccaaccccgagccttctgccaccccgccgctggaccgcagcagctctgtgggctgcctggcagaggcctctgcccgcttcccagcccggacgaggaacctctccggggaacccaggaccaggcaggactcccccaagccctcaggaagtggggagcccagggcacatccacatcagcctgaggacagggttccccccaacgcttagcctctctccaactgcttcagcatctggcttccagtgtccagcaacagacgtttccagccactttcctcgaatcatcccacttcctcagccccatctgtccctccgtccaggagctctcacggccccatctgttgtaccttcccatgtatgcagttacctgtgcctttttctacaccttttgttgcttaaaaagaaacaaaacaaatcacatacatacatttaaaaaaaaaacaacaacccacgaggagtctgaggctgtgaatagtttatggttttggggaaaggctgatggtgaagcctcctgaccctccccgctgtggttggcagccacccaccccagaggctggcagagggaaaggggtacactgagggagaaaggaaaaggaaacttcaaacaatatagaattaaatgtaaaaggaagcactcctgtgtacagatgcgatcaaggttcctgtttattgccacttcacccccctgcccagctcgtagccacccctctctgccagcagaaaggccagtgtccccaggcagaggggcacaaacacaggcaggtgacccccacccaggccccagcaggcaggcccagaaaaactaatcttttccttttttttttttttttttttttttgcaagaaaataaaatgatacttttcctaggatttcaacacaaaataataggtgcaggtagaaggaggagggctggctccccaagggctcctggatactctggtagtctgagtcatgggcccatcctggcactccacaggtgggcaggccaccccacccacgcacccccactccagacacctcccttctgcaccccaccctggccccctgggctggggaaggagccctgactgtccgtccctggctcccaagcccctgaccgaggcctcactctcctgttgcctcctctgttctaaaaccaccaaaccacccacaaaggcagaagtggcagggcccgagccctaggggccgttcctgagactgggttttgggttttgtttcatcttggtccctggggtacaagggagcctgttcccctcatggctgggtttttccagttctccacagcagaggtttgcggggaactgtttcaggaccactttgccacaggaccgtttccccccgtccctgcccctgtctccactaccccaaggaaatacccacaactgtggctggtggatacggcctggacctgtttgctgtcttacacctcttttttaaaaagagagaggatggtgtttgatacttcacccagccaccacagattcttttgacctagaggatttttgaattgtcctaactcgttggaattctccaaagcaatcagtgtgagccagtgcctcttccttacccacatctctactttcaagaagctgccctgcatttcctggggcaaaactctactttgtaagaaaaataataggaccagaaatttaaatcccaaattgaactatggaacttgaactctagcgtgttcgccccaactgggagaggtgagctttttcccagtgtttcagaactgattttctttactttctacaagggagggcagcacagggactacggttgaggcccgtgaaggctgggtttgatgccaccctatacagagcagggacctctctggctaatccccagtcctcagccaggctgtgtgaatcaagtgcctgccccagggctcttgagctattgaagctgcttgggtacaggacacagtaggtggggagggttaagacccttctgtgagttccctgtgcggggctgtacttgcctcttccaattcgtggcctttccctgcttggtccctactagacagacaaaccagccacagtccagcctgcagccagaccaccttgttcactcattctcctttgcctcagagctaagacaaaaatgagacagaaggcagggctccctgggagtccactgtgctccagggttctggggaatcagggttagccagcagctcctggctgcttccctcagagactagggctctcatcctccccaagagaagcagcaagcccagcctggaccacactgtccatattgctggacagtggcctgacagaaagtgactcctccaagtcccaggaggccagggcttttctcatccttgcctttcagccctaacccatgggactgcccacggattggagacttcaagggctgaggtctgggagctgcataaagggcattgcttcagcccaggttagaaatctgcctgggcaagctcttcctgccccagacctacaaagcagcagaccgggggctctggtggactagcccctgacattggtggggggccccacaccactccaccccaccctgccttccagctctcctgggcatttttctccctgtactcaaacagcctacccacccaaggtttcctccctgggcagcctagcaatgaacagtgcagccggcagggcagaggcccggcagtcaccgggcccgtcaggctcaggcagagaagccacaggggccaggagtcactggagactatttctaaatgatgggggtaaatgcacaaatagaatctcaccaaagggctgcctccacattgatgccgtgcccagagggacagaaccaatgccaccagcctgggtatatgtcactgggcacagctctaaccccctcctccggactctagtcccgctcctctgcgcacagagcccccagcccacaggtacaccttcatgatttggagaaagacgctcgccccatgcacgccctcctctgggccttctgccctgctcccagtcacttccaagcttcctgtttgcctgtgatgttattgtgcctgttgagggaagcagcagaggaggcagtggctgacttggcacagatgcctgctacgtgctctgttgaaatgcgcggggtggccattcctcggtacagactagtcctggtccttgggtgtgggcagtgggggaggaaccaactggtcgaggtttcagagccaaaccttgcctttggttggtgagtccttgccccccaggcctgcgctccacgatgcccttcacccttggcaatctcagggccatcctgggtagtaaccccactcctctctgctcccgcccgcacctgtggctctcactctgggctcaacccctgcaaccctccaggagcccgacagcagccagctgcctgcactgtcgcctccgtaagctccaacttccagacccagaagtccctctgcttccctctgttggaaaaagcctaaaagaattagcttccagattcctctagcccctgctccattcccacccagtccttctgaagaggaatgagcaatacatctgagctggatttctctctagtcctttctccagacaaatccttcttaaagcaaaagtcctggctgagcacctgtccttggggaccgatctgccgtgtgaccaggggaagaaagttcccgaaagcctgttccaccaattctgcttctgtgttgtgaatccagtctgctttccattagaaaaccgcttcggcacttatggtcactttaataaatctagtatgtaaaaaaagaaagaaagaaaagaaacagaaaaaagaaacgtgcaggcaaatgtaaaatacaatgctctctgtaagataaatatttgcctttttttctaaaaggtgtacgtattcctgtatgtgaaattgtctgtagaaagtttctatgttcttaaatggcaatacattccaaaaattgtactgtagatatgtacagcaaccgcactgggatggggtagttttgcctgtaattttatttaaactccagtttccacacttgcatcttgcaatgttggtatggtatatatcagtgcaaaagaaaaaacaaaacaaaaacaaaaaaaaaaacaaaaatccacgcaggtctaaagcacagagtctgacgtacaaaaggaaaaatgctcagtattgatgtgtgtgacctttgttgtaaattacatctgtactgtgaatgagaagtttttacaagtataataattgcctttattacagctctggctgagtgttcagcctgaggatattttttaaaaaaaaaagaattagcatgttggaataaatttgaaaatcccaacatagccctgcttgcctggctcatggtttttctagagggttccacaatgtcagagttggaaggatacttggcatcccaagtgctcattttgcttcagagcagtcaggccaagagagcggaggtgactaggctgcagtcacacagcccaggacactcttgcagaccctggaaaggcctcgcgaggaagcaccagatatagcaccatgtggtttggggcctgtatttgttccctagtctgctgtgacaaatcaccacgaactaggtggctttaaacaacagaaatttattctctcacagttctggaagcctgaactccaaagtcaaggtgttggcaaagttgattcctcccggaggctctgaaggagaatcaattctatgcccctcctagcttctggtggctgcaggcaatgcttggccttccctggtttatacactcatcactccagaccctgcctccacaaggccactttcacagattccaggctttaggacataaacttaactttcggggggacccccattcacctcacttcaagatgagtagtgaattggttcttgagtgttggcagtgggggaggcacagcgcttactgcctgtgagaccttgggcaactcacctaacctctctgtgcctctgtttcctaatctgtaaagtggagggtcatgatccacatctataagggctggcgtggggattaaatgagatggcatatacagggtggctaacacagcctggaacatagtaagccttcaacaatttgtttccgagcaggctttgcacagggttctggggttacacgggcggaaaagatagggagtcctcaccttctgtattcagcaatgatttgccgagtgccaacgagaggcagtcattgatacaacagcgagcaagacagacacagatccaccacgaggagctcacattgtagcaggggaggccatcatcagttactcaatcacagcggccatcactgctgtggtggaagagaatgacagtgctaatccagagtgagtctgcatcacccaggggacttttccttggaaaagtcctaagggtcgggaggacgaagggagccatgagaaggagatattaatggacgatcaagggggattctcagggtaaacgccgtccagaagtttagtgctaagagcctaagagggtctgttcgttcaaagcaatcagaggatgaattgttgccggcttttgggaaagctggactagtacagttcctggcgcacagtgggcccttcatagatgctgctgagtgttgagtgaataaatggtggctgtggatggtggtggttgaggagtgagggcaaggtggggaagtggaggtagcagacacagacaccttctaggggcctaggctagagacaggggagagctggggcagttgttggggggcgcgtggagtgcagggaaaggaagctgagtgtgtgattggctggtgaggagatgagaattcagcctggcttgatgaagagcagatgtagactcctctcccacagtggcctaaaaggaggggagggaggaagtgcagatgaagtcagtgtgtctatttggtgacgggaagttgaggacactcttaagaatggattgtatgtgggaaatagagtgaagtcacctgaggaagctgctgggtgagaagatcaaagacacctgagtaggagtgaatgacctttgaggggagccagaggaagccgccagggaaacagggaaggcacctgcatagcatcacgggccggctgccctctgtctgctcagcggtgtggtttttccagcagtcctcagccgctggctgtaggcatggggaaggtggcccagggttagccaggccatgggacacaaggacaatgagttactggaggtgagtcactggcgagtgaagaggttgaagccaccagccactgagcccacacgctgagaagggaacaaacaggcctggttgataaggagaaaggccagtggtcaagtgaccacttggatgaaaacaggaaaatgttgtgagttgtcttaactcgttggatgaagaccgtgtcagccacaggtgtggctgaggtgcgatggaagagatcaggaagtgagagtccagggtgctgagtgggctgtgcaggtggcagatgaggccatcactgaggattgcagggcttaagtggagatccgggctgtgagccaaggcctaacagtcaggatgggttctgttacgcagcagaaaccagcaacccagacactcagtggctgaatgcaaagggaagtgtatttctttccctcactatatgttcactgtgggtcagcaggggaattatgcttatcctagtcagaaacctaaactgatagaggctccttccctgtgcttccatgaccccaggggctgaggcaaatacagtactcgtggcctcctactggcaagtaaatgcttttacgtggaaactacaactatcccttccatgcatattttgctggctaaagcaagtcacgtggtcatgcctaatgaaggagaatgagaataattggaaacagccgtaatgataatcatacaaggctaggacttctcagaattggaagaggagatgagcagatgtcagcgatgggagggaggagggcctgacagtgttagcctcaaaggtgctggatttttacagtgagtgagtgaaaaaaatacagttcagaagaggccctgggagcaaacgtggcagctggctttagaatcatgggacgaagagccatcgttggagcaggtgcctggggagcacgtccttgggtcatgcggggggcatgtctcagtctaggccagtggggaagtagaccccccgcatcagccccagaaggagaagaagaatagcatagtatgtgctaggcccagtgtccagcattttacaaatttgatttgtagtccctacaacaaccagcaagatgagagttactgtccccatttttagagaggaaaacagaagctccaaagggcccccaggagccgaaggtgcacagctaggtaggggcagtatgaggactagaaaacccttgtgtggctcccatgtagtccttcagggaaactgaggtcctccctcctcctcccatctcacactcgggctccaggggagcccggaatctcagactgtccagctgtgaccactcagggtccagctggggcttctctccagcagcctcctgacttgtcagtatggccatctggtagccattttaggtccctgtgcctgaggccacaggtgcaaggaatgaccagccgacaccagggcctagattccagtaactgagagcgtgaaaagtgcctgtgaattctttcctccactggctgccaacaggcccaaggcccaccaatcattcacacatcgctggccagcaggcctcccaggctgctctctgaggttcatgaagcactttcccatttggagtggactaggacagggcgcacactcccatttgcagatgaaggggagagcccaagatcacaccctggcaagtggcaggaccactcacctgtccccctgaccccagcctcagagggtggtggccactgctggctgctgctgaggccttcaccaagctttgtctgggtccaagtccaagtctgggctggggatgcaggactcggggatcctacactcacccttaggcctgggtcctctctgggctcagaacctggaggccacactctgtcctggagactccggtggggtgtgggccactgtagataggatgggccagcctgagatgggcaggagtgcagagaagaaggaagagctggtggaggacagagagcaggtgaagagggtgcagatggggctgtgcttcttgggattcattatgggcactgctcaggagaccctgggaggagatgccttataacctcattatctattctagagtgggaaggtaggaagtatcagcgtcatttaacacgcaaggaaattgagtcacagtgaagttatttgcccaggttcagggtgccagagtggtgacactgctttcccaaggacatcatggtaagtgtcagggccaggagttgaaaccaggtcccgatatttgggaagtggttagcttcctatggaaagagaatctgggcctctttgctactaagcagccctggaacctgggttggggctgggggaccccaacatgcatattcctcggtcctttccaggcatcacctacttcagggggaccccgctgcctactgcttcccttccagatgagaaaactgacatccagagctgggaagtgcttggcccaaggtcagggctgtgattcccgatccctcaacaaagccacctgcaccaccccacccatccctcctctaccccaggcctgagttcaactgtccgtctctcctgcccagctctgcctttttaggaaaggaaaagaacagccctggggcgggcgggcaggcgggcgggcgggcatgctaatccacctgctcccggcgtctctagttacccgtggtttggggctgggcagccccagctgggagtgccagtccagccaatgggtgctgccggctgagctctccgccagagccataaaaggctttgccacagcccaggcctgagctggcatagggcagccccagcaccagcgcccgccccgcccctgagcctgccagcccggcacgtcctcggactctgcctaatccagcctgggagcagatgggcctgccgtgcacgtgcaccagacccaggccgctccaaggtcagggaggtggcaccaccagggcagaggccagagtcagggcaggggcttagctagccatggtgatcctggcgagggtccagggtgatgacacctaggcctggtccacgctgcatcatctcttgacaatggccacctagcctgcctcctccacctctgaagaggctctcagcaaagttagtatccggcttctgcaacttctggggtcttcccagggatcaagctccaacccacttaatccaccctgggttcaggccgcatgttcctctcaaaagtaggggtatccattagtgtgtgcctgttgtgagagccatgtgtgtatgtcccctgtggcctgcaggtggggacagacagcccctccccagcacagcccatccaatctgtcagcgcataatgcctctaacttaacactcatatgatccctggaaggtaggaagtattggtcccatttaacaagcagggaaatagagtcatgaagaggttattagcttaaggtcagggtgccaggatccagcttcagagcagtctgactctagagcctgtgttctagacctctgggcacgcagaccttctcttggaatttaccatcctggagggaaatgggaccaacatctagagcaacgtgtgaatgcgggaatgaaaggcatgtctgacacatctgagataagaggaccctttgttcctgagtgctgagagtagagggtgcttcccaggcctccaatgcaccgacactgcccaggctatgactgcccatgtctgcagcaacccagactggataatccctggccacctctgacaattagattcttcacagaagccactgggttcaagcacccttttgtgtgtcctacataggccaagctgaactgagggccaagactgcggtgttctccagggccaccctacaggtgaaggaaacgtgctggcatgggggggggggcgttggcgggcctggctggcatcaggctctgtttgctcacccaggaaaggaggagataaatatagacacaggattactcagatacagcctgggaaaaccggctccagagccttgacttcagccctggcccagcctcgccttcactggcctgcccacgcagtgcccgctgccaggcctgccccgcctcctctcaggacttccttcctacctgctctccctgggaactgggcaagcacttgtctcaactcccatagcaagtgaggaacagacaaagtcagcgcttgcttgggcaccgggagtacctttgaaggcccaggcactataccagtacagacacagtttcctcagtttccccgtctgtgaggtaagaggctggtgcacccagccctcaacttccttgggcctgaatgtagagaccacccagcagaaagagggtgaggtcgggttctgtctcacgcacaaggagatgccagtcagagtggcatgtgttgggggctgccctcggaccctggagccaagctgcatgggctggaatcccagctgtgccaggtattagcagtgggacttcagttaggttactttacctaatgtgcctcagtttctcatctctaaaaataagaataataatagtctattaataattattattacatatcacataatataaatcttatacatagtataataataatgaataataatagcactggcc

SEQ ID NO: 906 - DNA, 8382 bp, Homo sapiens
gcaggattcgaggcacaaacccagcagcctcaacctagttcatggaggagcctcgcggggtcctggccaagcaagcccgcccctctggtgggaagagcggcgcctaggtggagggtggctgccgcaggagtggacatgaatgctggctttcagagagaacagcgtttcagttttggtcatcggaagtggtgccttcagcacagaagaagagcgtgatttctcctccaaggccgttgatctccaacccagaactaaaggggagaagagccacccccagcatccagcgtggcatctcttgtgccaggaccagggatgactgggccatggacacagatgtctccaaccttcaaccgtttgcatagcacacgggggactcgtgggggccacctgccactgccagctgaaacaatacaatggcaatactgacatccttcatgacgttttcccgacagacattcaggcagaaagtgctggtgcgttttctgtctgcaaagtagagggccatgcctcaccaatagaatagcgtgggccctgatgacctgctccgagtccactcacagccagtgacacttgcaaaaaactcccaaagccgtcttgggtttggctcccacagctcttgaccaatgtggccaaagctggacacctccttgggacactgggattattcataaatgcagcccgccctgactctccctgaatagcatctgaagtctttgtgaaggtcatggatcctgaacaaagtgtcaagggcaccaagaaggctgagggaagtccccggaagcggctgaccaaaggagaggccattcagaccagtgtttcttccagcgtcccatacccaggcagcggcacagctgccacccaagagagccccgcccaagagctcttagccccgcagcccttcccgggcccctcatcagttcttagggaaggctctcaggagaaaacgggccagcagcagaagccccccaaaaggccccccatcgaagcatccgtccacatctcacagcttccgcagcaccctctgacaccagcattcatgtcgcctggcaaacctgagcatctcctggaggggtccacatggcaactggttgaccccatgagacctggaccctctggctccttcgtggcccctgggctccatcctcagagccagctccttccttcccacgcttccatcattccccccgaggaccttcctggagtccccaaagtcttcgtgcctcgtccttcccaggtctccttgaagcccacagaagaggcacacaagaaggagaggaagccccagaagccaggcaagtacatctgccagtactgcagccggccctgtgccaagcccagcgtgctccagaagcacattcgctcacacacaggtgagaggccctacccctgcggcccctgtggcttctccttcaagaccaagagtaatctctacaagcacaggaagtcccatgcccaccgcatcaaagcaggcctggcctcaggcatgggtggcgagatgtacccacatgggctggagatggagcggatccctggggaagagtttgaggagcccactgagggagaaagcacagattctgaagaggagactagtgccacctctggtcaccctgcagagctctccccaagacccaagcagccccttctctccagcgggctatacagctctgggagccacagttccagccacgaacgctgttccctgtcccagtccagcacagcccagtcactcgaagacccccctccatttgtggaaccctcatctgagcaccccctgagccataaacctgaagacacccacacgattaagcagaagctggccctccgcttaagcgagaggaagaaggtgatcgatgagcaggcgtttctgagcccaggcagcaaagggagtactgagtctgggtatttctctcgctccgagagtgcagagcagcaggtcagccccccaaacaccaacgccaagtcctacgctgagatcatctttggcaagtgtgggcgaataggacagcggaccgccatgctgacagccacctccacccagcccctcctgcccctctccaccgaagacaagcccagcctggtgcctttgtctgtaccccggacgcaggtgatcgagcacatcacgaagctcatcaccatcaacgaggccgtggtggacaccagtgagatcgacagcgtgaagccaaggcggagctcactgtccaggcgcagcagcatggagtccccaaaatccagcctctaccgggagcccctgtcatcccacagtgagaaaaccaagcctgaacaatcactgctgagcctccagcacccgcccagtaccgccccccctgtgcctctcctgagaagccactcaatgccttctgccgcctgcactatcagcaccccccaccaccccttccgaggtagctactccttcgatgaccatatcaccgactccgaagccctgagccgcagcagtcacgtgtttacctcccacccccggatgctgaagcgccagccggcaatcgaattacctttgggaggggaatacagttctgaggagcctggcccaagcagcaaagacacagcctccaagccctcggacgaagtggaacccaaggaaagcgagcttaccaaaaagaccaagaagggtttgaaaacaaaaggggtgatctacgaatgtaacatatgtggtgctcggtacaagaaaagggataactacgaagcccacaaaaaatactactgctcagagcttcagatcgcaaagcccatctctgcaggcacccacacatctccagaagctgaaaagagtcagattgagcatgagccgtggtcccaaatgatgcattacaaactgggaaccaccctggaactcactccactgaggaagaggaggaaagagaagagccttggggacgaggaagagccacctgcctttgagtccacaaaaagtcagtttggcagccccgggccatctgatgctgctcggaaccttcccctggagtccaccaagtcaccagcagaaccaagtaaatcagtgccctccttggagggacccacgggcttccagccaaggactcccaagccagggtccggttcagaatcagggaaggagaggagaacaacgtccaaagaaatttctgtcatccagcacaccagctcctttgagaaatctgattctctcgagcagccgagtggcttggaaggggaagacaaacctctggcccagttcccatcacccccacctgccccacacggacgctctgctcactccctgcagcctaagttggtccgccagcccaacattcaggttcctgagatcctagtaactgaggagcctgaccggccggacacagagccagagccgccccctaaggaacctgagaagactgaggagttccaatggccccagcgcagccagacacttgcccagctcccagctgagaagctgccacccaaaaagaagaggttgcgcctggcagagatggcccaatcatcaggggagtccagcttcgagtcctctgtgcctctgtctcgcagcccgagccaggaaagcaatgtctctttgagtgggtccagccgctcagcctcgtttgagagggatgaccatgggaaagccgaggcccccagtccctcatctgacatgcgccccaaacccctgggcacccacatgttgactgtccccagccaccacccacatgcccgagagatgcggaggtcagcctcagagcagagccccaacgtttcccattctgcccacatgaccgagacacgcagcaaatcctttgactatggcagcttgtccttgacaggcccttctgctccagccccagtggctccaccagcgcgggtggccccgccagagagaagaaaatgcttcttggtgagacaggcctctctgagcaggcctccagaatctgagttggaggttgcccccaagggaagacaggagagcgaagaaccacagccctcatccagtaaaccctctgccaaaagctcattgtcccagatttcctctgcggccacctcacatggtggacccccgggaggcaagggcccagggcaggacaggcccccattggggcccactgtgccctacacagaagcactgcaagtgttccaccaccccgttgcccagacacccctgcatgagaagccatacctgcccccaccagtctcccttttctccttccagcatctcgtgcagcatgagccaggacagtctccagaattcttctccacccaggccatgtccagcctcctgtcctcaccatactccatgcccccacttcctccctccttatttcaagccccaccgcttcctctccagcctactgttctgcacccaggccaactccatctcccccagctcatgcctcacccagccaacatccccttcaggcaacccccttccttcctccccatgccatacccgacctcctcagcactgtcttctgggtttttcctgcctctgcaatcccagtttgcacttcagctccctggtgatgtggaaagccatctgccccagatcaaaaccagcctggccccactggcaacaggaagtgctggcctctcccccagcacagagtacagcagtgacatccggctaccccctgtggctcccccagccagctcctcagcacctacatcagctcctccactggccctgcctgcctgtccagacaccatggtgtccctggttgtgcctgtccgtgttcagaccaatatgccgtcctatgggagcgcaatgtacaccaccctttcccagatcttggtcacccagtcccaaggcagctcagcaactgtggcacttcccaagtttgaggaacccccatcaaaggggacgactgtatgtggtgcagatgtgcatgaggttgggcccggcccttctgggttaagtgaagagcaaagcagagctttcccaactccatacctgagagtgcctgtgacattacctgaaagaaaaggcacttccctgtcatcagagagtatcttgagcctggaggggagttcatcaacagcagggggaagcaaacgtgtcctttcaccagctggcagccttgaacttaccatggaaacccagcagcaaaaaagagtgaaggaggaggaggcttccaaggcagatgaaaaacttgagctggtaaaaccatgcagtgtggtccttaccagcaccgaggatgggaagaggccagagaaatcccacttaggcaaccagggccaaggcaggagggagctagaaatgctgtccagcctgtcctcagatccatctgacacaaaggaaattcctcccctccctcaccctgcattgtcccatgggacagccccaggctcagaagctttgaaggaatatccccagccatctggcaaacctcaccgaagagggttgaccccactgagcgtgaagaaagaagattccaaggaacaacctgatctcccctccttggcacctccgagctctctgcctctgtcagaaacgtcctccagaccagccaagtcacaagaaggtacggactcaaagaaggtactgcagttccccagcctccacacaaccactaatgtcagttggtgctatttaaactacattaagccaaatcacatccagcatgcagataggaggtcctctgtttacgctggttggtgcataagtttgtacaaccccaaccttccgggggtttccactaaagctgctttgtccctcctgaggtctaagcagaaagtgagcaaagagacatacaccatggccacagctccgcatcctgaggcaggaaggcttgtgccatccagctcccgcaagccccgcatgacagaggttcacctcccttcactggtttccccggaaggccagaaagatctagctagagtggagaaggaagaagagaggagaggggagccggaggaggatgctcctgcctcccagagaggggagccggcgaggatcaaaatcttcgaaggagggtacaaatcaaacgaagagtatgtatatgtgcgaggccgcggccgagggaaatatgtttgtgaggagtgtggaattcgctgcaagaagcccagcatgctgaagaaacacatccgcacccacactgacgtccggccctatgtgtgcaagcactgtcactttgcttttaaaaccaaagggaatctgactaagcacatgaagtcgaaggcccacagcaaaaagtgccaagagacaggggtgctggaggagctggaagccgaagaaggaaccagtgacgacctgttccaggactcggaaggacgagagggttcagaggctgtggaggagcaccagttttcggacctggaggactcggactcagactcagacctggacgaagacgaggatgaggatgaggaggagagccaggatgagctgtccagaccatcctcagaggcgcccccgcctggcccaccacatgcactgcgggcagactcctcacccatcctgggccctcagcccccagatgcccccgcctctggcacggaggctacacgaggcagctcggtctcggaagctgagcgcctgacagccagcagctgctccatgtccagccagagcatgccgggcctcccctggctgggaccggcccctctgggctctgtggagaaagacacaggctcagccttgagctacaagcctgtgtccccaagaagaccgtggtccccaagcaaagaagcaggcagccgtccaccactagcccgcaaacactcgctaaccaaaaacgactcatctccccagcgatgctccccggcccgagaaccacaggcctcagccccaagcccacctggcctgcacgtggacccaggaaggggcatgggccctctcccttgtgggtctccaagacttcagctgtctcctctcaccctctgccccctgggaagagaactggcccctcgagcacatgtgctctccaaactcgagggtaccaccgacccaggcctccccagatactcgcccaccaggagatggtctccaggtcaggccgagtcaccaccacggtcagcgccgccagggaagtgggccttggctgggccgggcagcccctcagcgggggagcatggcccaggcttggggctggccccacgggttctcttcccgcccgcgcctctacctcacaagctcctcagcagaagcccagagacctgcgcctccccgtggcagaaggccgagtcccgaagtccctcctgctcacccggccctgctcatcctctctcctcccgacccttctccgccctccatgacttccacggccacatcctggcccggacagaggagaacatcttcagccacctgcctctgcactcccagcacttgacccgtgccccatgtcccttgattcccatcggtgggatccagatggtgcaggcccggccaggagcccaccccaccctgctgccagggcccaccgcagcctgggtcagtggcttctccgggggtggcagcgacctgacaggggcccgggaggcccaggagcgaggccgctggagtcccactgagagctcgtcagcctccgtgtcgcctgtggctaaggtctccaaattcacactctcctcagagctggagggcggggactaccccaaggagagggagaggaccggcggaggcccgggcaggcctcctgactggacaccccatgggaccggggcacctgcagagcccacacccacgcacagcccctgcaccccacccgacaccttgccccggccgccccagggacgccgggcagcgcagtcctggagcccccgcttggagtccccgcgtgcaccggccaaccccgagccttctgccaccccgccgctggaccgcagcagctctgtgggctgcctggcagaggcctctgcccgcttcccagcccggacgaggaacctctccggggaacccaggaccaggcaggactcccccaagccctcaggaagtggggagcccagggcacatccacatcagcctgaggacagggttccccccaacgcttagcctctctccaactgcttcagcatctggcttccagtgtccagcaacagacgtttccagccactttcctcgaatcatcccacttcctcagccccatctgtccctccgtccaggagctctcacggccccatctgttgtaccttcccatgtatgcagttacctgtgcctttttctacaccttttgttgcttaaaaagaaacaaaacaaatcacatacatacatttaaaaaaaaaacaacaacccacgaggagtctgaggctgtgaatagtttatggttttggggaaaggctgatggtgaagcctcctgaccctccccgctgtggttggcagccacccaccccagaggctggcagagggaaaggggtacactgagggagaaaggaaaaggaaacttcaaacaatatagaattaaatgtaaaaggaagcactcctgtgtacag

SEQ ID NO: 907 - protein, 2392 aa, Homo sapiens
MDPEQSVKGTKKAEGSPRKRLTKGEAIQTSVSSSVPYPGSGTAATQESPAQELLAPQPFPGPSSVLREGSQEKTGQQQKPPKRPPIEASVHQLPQHPLTPAFMSPGKPEHLLEGSTWQLVDPMRPGPSGSFVAPGLHPQSQLLPSHASIIPPEDLPGVPKVFVPRPSQVSLKPTEEAHKKERKPQKPGKYICQYCSRPCAKPSVLQKHIRSHTGERPYPCGPCGFSFKTKSNLYKHRKSHAHRIKAGLASGMGGEMYPHGLEMERIPGEEFEEPTEGESTDSEEETSATSGHPAELSPRPKQPLLSSGSSGSHSSSHERCSLSQSSTAQSLEDPPPFVEPSSEHPLSHKPEDTHTIKQKLALRLSKKVIDEQAFLSPGSKGSTESGYFSRSESAEQQVSPPNTNAKSYAEIIFGKCGRIGQRTAMLTATSTQPLLPLSTEDKPSLVPLSVPRTQVIEHITKLITINEAVVDTSEIDSVKPRRSSLSRRSSMESPKSSLYREPLSSHSEKTKPEQSLLSLQHPPSTAPPVPLLRSHSMPSAACTISTPHHPFRGSYSFDDHITDSEALSRSSHVFTSHPRMLKRQPAIELPLGGEYSSEEPGPSSKDTASKPSDEVEPKESELTKKTKKGLKTKGVIYECNICGARYKKRDNYEAHKKYYCSELQIAKPISAGTHTSPEAEKSQIEHEPWSQMMHYKLGTTLELTPLRKRRKEKSLGDEEEPPAFESTKSQFGSPGPSDAARNLPLESTKSPAEPSKSVPSLEGPTGFQPRTPKPGSGSESGKERRTTSKEISVIQHTSSFEKSDSLEQPSGLEGEDKPLAQFPSPPPAPHGRSAHSLQPKLVRQPNIQVPEILVTEEPDRPDTEPEPPPKEPEKTEEFQWPQRSQTLAQLPAEKLPPKKKRLRLAEMAQSSGESSFESSVPLSRSPSQESNVSLSGSSRSASFERDDHGKAEAPSPSSDMRPKPLGTHMLTVPSHHPHAREMRRSASEQSPNVSHSAHMTETRSKSFDYGSLSLTGPSAPAPVAPPARVAPPERRKCFLVRQASLSRPPESELEVAPKGRQESEEPQPSSSKPSAKSSLSQISSAATSHGGPPGGKGPGQDRPPLGPTVPYTEALQVFHHPVAQTPLHEKPYLPPPVSLFSFQHLVQHEPGQSPEFFSTQAMSSLLSSPYSMPPLPPSLFQAPPLPLQPTVLHPGQLHLPQLMPHPANIPFRQPPSFLPMPYPTSSALSSGFFLPLQSQFALQLPGDVESHLPQIKTSLAPLATGSAGLSPSTEYSSDIRLPPVAPPASSSAPTSAPPLALPACPDTMVSLVVPVRVQTNMPSYGSAMYTTLSQILVTQSQGSSATVPKFEEPPSKGTTVCGADVHEVGPGPSGLSEEQSRAFPTPYLRVPVTLPERKGTSLSSESILSLEGSSSTAGGSKRVLSPAGSLELTMQQQKRVKEEEASKADEKLELVKPCSVVLTSTEDGKRPEKSHLGNQGQGRRELEMLSSLSSDPSDTKEIPPLPHPALSHGTAPGSEALKEYPQPSGKPHRRGLTPLSVKKEDSKEQPDLPSLAPPSSLPLSETSSRPAKSQEGTDSKKVLQFPSLHTTTNVSWCYLNYIKPNHIQHADRRSSVYAGWCISLYNPNLPGVSTKAALSLLRSKQKVSKETYTMATAPHPEAGRLVPSSSRKPRMTEVHLPSLVSPEGQKDLARVEKEEERRGEPEEDAPASQRGEPARIKIFEGGYKSNEEYVYVRGRGRGKYVCEECGIRCKKPSMLKKHIRTHTDVRPYVCKHCHFAFKTKGNLTKHMKSKAHSKKCQETGVLEELEAEEGTSDDLFQDSEGREGSEAVEEHQFSDLEDSDSDSDLDEDEDEDEEESQDELSRPSSEAPPPGPPHALRADSSPILGPQPPDAPASGTEATRGSSVSEAERLTASSCSMSSQSMPGLPWLGPAPLGSVEKDTGSALSYKPVSPRRPWSPSKEAGSRPPLARKHSLTKNDSSPQRCSPAREPQASAPSPPGLHVDPGRGMGPLPCGSPRLQLSPLTLCPLGRELAPRAHVLSKLEGTTDPGLPRYSPTRRWSPGQAESPPRSAPPGKWAGPGSPSAGEHGPGLGLAPRVLFPPAPLPHKLLSRSPETCDWQKAESRSPSCSPGPAHPLSSRPFSALHDFHGHILARTEENIFSHLPLHSQHLTRAPCPLIPIGGIQMVQARPGAHPTLLPGPTAAWVSGFSGGGSDLTGAREAQERGRWSPTESSSASVSPVAKVSKFTLSSELEGGDYPKERERTGGGPGRPPDWTPHGTGAPAEPTPTHSPCTPPDTLPRPPQGRRAAQSWSPRLESPRAPANPEPSATPPLDRSSSVGCLAEASARFPARTRNLSGEPRTRQDSPKPSGSGEPRAHPHQPEDRVPPNA

SEQ ID NO: 908 - DNA, 68820 bp, Mus musculus
  misc_feature (1)...(68820): n = A,T,C or G
agagtgtggtttgctcccccagagtgtggctatgctcttgtgctcagggaacaccccaaacaccaactaccagctcccacctctcctttttcaaggtctcactatgtagctcagactgtcttggacgtcactctgtagaccaggctagcctccatctgcctctgccttcctagtgcggagattaaaggtatgcaccacttcatccggtttctccagacttctctgaacagtcacacctggctctggtcctgtctgtccgactacaggctccacggaattcttccctggtcctgagccagtgccgaccacctgcagggcggttgtcctccctctgttctctggtttcctgtctctctagttgtttctccttggagtttctcctttgcgcacgctggcttggctcttgctcaaaggcctgccctgccttcctcttctcacttgccatgttcttccagaaccatgtatgtattggttgttttgttttggtcattttttttaaatcattttgtgtgtgtgtgtgtgtgtgtgtgtgtgtgtgtgtgtgtgtgtgtgtgtgtgtatgagagagagagagagagagagagagagagagagagagagagaatatagagtcagttctttccttccacttttatgtagaaactcaggtcaccagacttgcatagcaggtacttttaccccagtggccttatatattggctgtttgcttgtttgttttgtttgtgacaggtctcatgtatcctaggctggtctcaaactgactatgtagttgagggtgaccttgaacttctgatcctcctgcttttgcctcctgggttttgggattacagacatgcaccacaagcctgttttataaagtgctggctacagaacccagggattacccagggctctgagcatgctagataagtaccctacccactgagctataccctcagcccctctccctgggccatcttatccaccccattgactttaattactggttgttttccgcagagccccagacctacttatgcaactgtctttggaatgttccacacacatcaccaactccccatgtgcagaatgaaattatcttcttgcccacaaacccactcttcctcctgtgtgacctacacagctggtggctccaccctttgccctattggttcaggcaaatacatacacatatcttctgagccaccctctcctctccatccctactatatcatcctctttagcttatattattgcatgtttcccctccccctggaatagaatctcaggttggtcactctgtgggacgtttggtcagctggtcctcctgcttcctcctgttcctatggaatcaccacacaaacccagggcttcgtgcatgctaggatagcagtgtattaaccgagccacagcagtgcaacctgctccttagactctcggtgtccattttatctgtctgcagcttatgattctttctcaagatgttagggataaatccatttctcaccctttctaagtttctagaagattcctacattccttcattcaaggtgcccttcttcaccttacatctctctgacactcttctacaggaagatcttttaaaattttgtttttagggctggagaaatggttcaatggttaagagcactgggtctgggttcaatgcccggcacccacatgtcagctcacatccataactccagtttcaggggatctgacactctcacaccaatgcatgtaaaatacaattaaataattgtgagagtaaaaacatttgggtacctgttacagactgaaaataggctcaagccaacacagggctcaagagtggacaacccatttttatttttggcttccattgagggaattgaagggataggtgtgccacatgatcaatttcaaaagcgttttctctcagagaatgttctgaccttttgatcgtactaacaacagatccctggcctgtcgcctcagctttctctctaaggcattctcctgatggccaggccttcatttaaattcagtcccagccatcagctcctaggcttgttggtttgctttttgagctgtggtcttgctatgttgcccaggctggtctccagctcctgggctcaggcaatcttcctgcctcagcctccaacatacctgggactacaagcttgcactaccatgctcagctttggtaaagcagaattactactgtgtatcataaagcagatgcaagatattttacatccttaatatagtgtgtgtgtgtgtgtgtgtgtgtgtgtgtgtgtgtgtgtgtgaaggtcataggaactccatcatgtgagttctaagggactgaatttagtttgtcaggcctggtgtccagcacctttacctgctgagctatcactgctccgaatgtgaactttcaagtacattacttgaccaagatgtggttggtgctacacacctgtaatctcagcactcaggagatggtagagactggaggatctgaagttcaaggtcaccccctgctatatgagtatttgagaccgtcctgggttagacactttgtcaaaaacaaacaaacaaacaggaagccacatgttttctagtgaaggccttcaggaggggttaccaggatcgccagcctatgagtcaacacttgaatcacagaaatcaattggacacaccgtagctttttggagatgaataaggctaacctcctttaacagaggtcagtgtgttaacctgcgggccctactccagaacagcgtgagcctacagccaggtcagaagaggcctgggaagctgcattctctcaaacttcaagaaccaaagaacagtgctgctgccaatggatgacacatctgtttcctaggaagaaacaaagccacaacaggactgtgcagtaggtgtgcatggtgatttgcaaatctgggccacttcctgttctgaaaccagttgtgaaatttgtttgggcaagttgcccaaccagggagtcaagggaagttgccaacttgacttctggcctaaagacattctttgcaggtctattgggccccactcagctgagtatttcaggaatatggcagctaaagaaagggctcgaggttgggtgtgtaacagccaatcatcgtcactggtgaacagagtcaggtgaagaaacttcccttttcttaaacattacccatctatcgatctctctatctctctatctctctatctctctatctatctatctatctatctatctatctatctatctatctatctgtgtgtatgtttgcagtgtgcgtaggggacacatgggtgccacaatgtgcacgtggaggtcagacgacaactttcaggagtcaatcctccccttccaccacgtggttcctgaggatcaaacttggctcatcacatttggcagcaagtgccctacctgttgagccatggggctggcccagttgagctttcgtttgtttatggtctctgtctctgtctctctctggatctggagagagaactcccactgctgacacgttcccaggtgatgctgatgctgctcatctggtggctaaggatctctgaacttgagcaaggcagagtaggatgacaccaccctgatgctgatggccttgtcagggagctgtgtcagtgtgaaccactgccctgcttctgaatttcctgttcagtgagaataaactattatttgtttaagcccagttggattgattatcacttccatttaacaggtttctgaacttggagctgggaatgtagctcaactggtatagtttttcctggtatggacaacgcactgggtttggtgtccagcactgcgtaataagccagctttggtggctcacatttgtagtcctagtattcgggagacaaggagcaggagttggaggtcatacttgggaagctagtaaattcaaggccagcctgggctacttgcgaccctgtgtttcaaagcaaacaacaaataaaacccaagcccaaaatgaaataaatcactcaagaggaccggtgagaagcctcagtgagtagaagcgcctgccttctaagcctggccacttgagttcaatccctgggacccaacctaatgggggaaggaaagagctgactctcaaattgtcctttgacctcatttaaaaatcattttaaaaacaattcaaggggactggagagatgcctgagcacttaagagcactggcgaggactgtgctacaattcccagcacacacatggtggctcacaaccacctataactccagttccaagggacccaatgttcttttctggcttctaagggcatcaggtatacaaatgacacacacacatacaggcaggcaaagcactcccacacataaattttttaaagaaaaaaccttaaacctcaagactcaatgtacagggtttataacgtcagccagccagcactgtccacccacccccacctctatgtacttgaccccctccactccacccccctcctttgaagtaactattttcaacttttaaggagcttgcttttgtaattgaggggtttgactgaacagcatgttaaattaccctgatttgccccccatctttgtttatctctggtccattcttcatgaccttcaccttgggctcgaccattatgtaactgggaagagacgttatctccgttttccatagttggtgtatctctctgcattgactgtttttttttgtttgtttgtttgtttggttggtttttttttttttttttttttttttttttggatagtgtaggcccaggaggtggtttgggcaggagccaatcaagcccatggccaatgtgaaagaggcagctgaagagagttctaagaagagccctgctgtgctgttatcttgaggccagcatcagcagaaagctgtgaccctcaaactctggggcaacagggagggttctggaagatctcctgtagtggtgtgaaaaggtccttgaaggaatgctgttgtcagcacaggaaggaaatgcctctggcagcaggaaaaacaagcagagaaaccaagtaactcagcattgctttgttttcctgcctgtgcccattgttgactaatggctgagcacaaccagaaccttgccttccagggatctgtctgatgctctccactggagtgactctggggcccagggagggatgaagggcagatagagtgtggggggcattagaacatagcaacagggggagctacaattttgaaagcaagaacagagagaaaagaaaagaaaagaaaagaaaaggaaagaaaagaaaagaaaagaaaagaaaagaaaagaagggaagggaagggaaggaaaggaaaggaaaaaaggaaaggaaaggaaagaaaagaaaagaaaagaaaagaaaagaaaagaaaaaagaaaagaagggaagggaagggaagggaggggaggggaggggaagggaagggaagggaagggaagggaagggaaaggaaaaaaaagaaaagaaaaggaaagaaggaaagaaactcccttgttgttccacagtgcttctagaacagcagggtggctagcttggaattctaggttggcaactctttctctcagaatcttgaaggcaccatttcatggtctcctggcttcccctgctgtttttgagaactctgtgtcattctccttcccattccttctacatgtgactggtttttcctttctggaaacttctggtctcctccccaaccctccgatgttttgctttttacagtttatatgctgtggtgtgaggtgatttcctttcattacacttcagtgtctctcccaggaagccttggtcaggtgtgtttacccaatcccttacaagaccctgaaaatgcaggagctattgatacagctctcggacggatgctgtctgttcttgcatgtggctggagatcatgctagcacaatcaccctgccatggtggtagcagtgagttgctgagctatagtcaatacacagctggtccagcctcctctcccaggatccatatcactgaatagttatagggcagagaaaggaagacaaagaagaggcttgatagagctggggccacacgttgtcctaaggaaaatggcagacttgcatagcatgaaatcctggtattggaactgggtttccacatcgacggggaaaggatcaaaggccagccaacaggctcacagggaagacttcatgagactgcccacaaacagggatggtttggggtccagagtacaatgtgtaaacagatgaggagaagccattctctgtctggaaggaaagggtgattgctgatcttctggaatcccaagtagtgtggacatcaggacctagcgccaccaagtaaagcaccgactctgtcctcgtgggcactttcagcagtggcaagcagaggcacttttgagagtcaggctgtggaagtgggcatgtgggaattccagcaggagagaagggacaggcaagcaaggctggctcacagctggttgcttcggtacagccaagttctcaaggctgacagtgaagtcacagcacattgtcacatcttaaaaaaaaaaaagcgagagttagctggagttagcccaataggctctgagatccacagtgaatttctgagattcactggagacccacagttcatttactgtgacagctaacgaagagatgacaggaaaatagaaaattagtccagctcgcttaatgacaaagccatttaattggtattaccctaaattggtaccctgactaaccagtgggttggaaactattttagttcaatgtatgactcaagagattttatctcctagctagaagatgctgggatgaaaagctccacgtggcagcagtccaaacatgttccccacagcactactagagtcacggtctgggcattttgctgcagagctcactctagcatggcagctcaggaaaaaattcatttctgagccaggtggtgcaaggtactctgctacaaaaataaacaagaaagggaacagataagtacatatgcctcgagtattatgaattttttctttattgctcttttgtttgtttgcttgcttgctttaaaacaggatctcctgtaacctaggatagcctaatgtccactatgtagctgaggctagccttaaactcctgtgctacctgcctccatctaccaagtgctggggtcacctatgtgccaccatatctggctttgatgaatcctttttatgtaggatcagctaagttacaatttggtgagaaaacaacttaataacttaaagcaagaccttttgttgttgttgttgttgttgttgttgttgttgttactcattacttctgatctttttctgattagtggcgagctcttgctaaattcaggctttggttacaaagcctaacctggaacttctagggctgcccttgcagggaccaggagcaagggcatgttctctacagtcggtgcttcagtctgtcttgactgtctgtcctttgtggatagtgtgttccagtcaaaacagcaaattaaggcttcagacataaagcgacatatttctgcttggcccattgactatgtctgactacaaacagatcaggaaataaaccctatcatggactgataaggccaaaagccagacatatttagcaataggtgttgattgtctaccacttgttttgtgctgagagttgttctaaatgcgttgcaggtttcagccctgagaagctttgcatcaatcccaggaaacaggtagttagcaccattatcattcctactgcatacatgaaataccaaggcaagaagttaagcaacctgccaaagccacacaaacagaattcaaattttggatctcagcccaggtgatctgacctcatggtatatgtgcctcgtctccatactgtgcagccaaatggaaggaaatgagaagctgtcaaaggctttttcaacgggtgagcatggttaagtgagatcctcgtacaagaggagtcaggtggagcaaagccacccgtgaatgactccagcgccagaaaattggatgcccttttcctggactccaagggcacctgatctgttatgtgcagacccacatatagacacacatacacatagttaaaaattaaaactaaatcttaaggccaacatattgcaatgcctctaatcctagcactcaggaggcagaggcaagcagaactttgtgaggtcaaggccaacctggactacagagtgaattcaggccacccagggctatatagggaggccctgtctcaataaaatcaaataaaaatttaaaaacgactaagagaatatcaaatctgatggacctgtcttaggaaaatactatatgaacttggacgtttatgaaagtaagttctttgagacttcactggaatgaaaaggtttggaacaggaataaattattctgattaataatgtaacaaatattttaatttccctttataatatataaatattatatattacaatatataataaataaatatataatataaacattttgaggggagcctggtcttgggagaaagtagagatgaacaagactgctgtcttagaggcaaataaacactttgtcttgctggcctccctggtctattactctagccttcagaagaatcccttaagagcaaatatcaggaagtagcgttctcttcccctttagcacatcctgttttttctcagtctcttttaagaatttgatgagtgaagggacggaatgcatacacaggaagatggccgtgggttcaagacactatttgtaacaagagaggctttggaaaataatacctaataaccatttttaagtagctgcttattccatgttaccctataactggctctcccccaaacaacctgagagatggctcagcaggtgagagagtttggtaatctctcataggaccctggttccttccccaacacccacatcacacaccctcatccatcagctgaaactccagcttcaggtactgcaatgccctcttctggcctccttggacacctacacacacacacacacacacacacacacacacacacacgcacgcacacgcacacgcacacgtacgcactcacacacgcacgcatgcacacacacgcaagtaaaggaggctaggtatggtggcacatacctttaatcccagcactttggaggcagttctctgttagttcgaggctatcctaatctacaatataaagttccaggccaccaagggctacttaggaagaacctgttcaaaaaaaaattttttttaaaggaaagaaaagttctgcctagacactagtcagagcgatgctcaaaaagggcagtagtcacagagaagactaatgtatatcagcggcaggaggcattccaagttagaagtgatcacgagggagggtgtaatgtctctttaactcgggtcagagggtgagtccttttgtctcttgaaggaaagactaacctaaaggagtctgggatagccacaacccttgtattatataaggataataaacacacatcttataaaggttgctgtgaagagcatactgtgataattgatagaaagcgcttagagcagtacatggcacacagtatgagctctgtaaatgttggtcgttcccttcactttattctcttcactctcctccctctccacccggcttcattcattcttttccaagggcacgcagggggcgtgtcctccctcccgccgcttccacctaagccccgcccccggctcttcccggattggttcctaggaggcggagccaaggggagagcccagtgcagcgcggtgggcggggcgcatgcgcgggttgggctgggtggaggaggagaggaagagctgccggaagtaggcggtggaggtggcggctgagctggtcgcagctgccagggaaaccgaggcgggaagcacagcgggcagaccctcaacactcggggtcaagtgtgcgtcccgcacgcctgaagccgggagctcgctccacctaggccacttctggggtcccgcagcctccgcgagtccctgccttgcccgaagcccgccagggggcgccgcgctgagggnnnnnnnnnnnnnnnnnnnncaggggttcttggggggtgcagggggcgcgtcgccctctgcccccgccggcaccctggccatgacaggcaagtcggtgaaggacgtggatcggtaccaggcggtcctggccaacctgctgctggaggaagataacaagttctgtgctgactgccagtccaaaggtaacgcatccggggcgccggcggggggccagctgcggggcggcggcgtggcgatgagctgcgatggcctgagtggggagggggttctggagctcagggcgagtcctcttcgtatgaccacgcgagccaccctcgctcatgagcttgctgggtttcctcgggcttgggacttggggtttggtgtgggcgagtgtgtgtgtgtgtgtgtgtgtgtgtgtgtgtgtgtgtgtcagcgaagtggggatgatatagtggggggtggggttgcccggtgtgttcaggtgagactgtctatgttgcagactctgaatggcttctgggctcgctgtcatgcagagctggcagccttttacttggcaaagctgtgggtgagctgcagtgtggtgggggtggcggtgggggtgacgaggaggaaggtgagatgactaagagaaaaactgtcgaaatgatatttaaaggtggcattccttgctgtctgctatgtcgttagcagctcctgtcattttaccaccttgttgagctcagaccgagtgcttaggtggctttcttcacccaggtcgtgtgcactgagaaacagctaccttatgcagtgacacagtgcggatttctaggtagtctagcctgggttgtggaggcctcatgcgtgtgtggtgagcgaaactagcagacctggactgtagtgcaggacccgttcaagcagggagaaaaggaagcaaggaattcccccaattcgttatttccctggtgattacacctttagagaggaaatagaaattggccacaaccacttagcctttgttttctgtgtctgtaaaggttcatgctgtgttacaattaaaggtcaatatggtagaaaatttactagtgaattctgtacagctttgtaggtaggagcagctataattgggagggggtatttactttagttcatttcctgaatttgccatgtagcatatgggtataaagtagtataaagcattcagatgtgtgtgtgtattaatgttgagaaaagcaatagatacttagcccatacttcatgtgattatggtttattttagagtaaggttatgtaaggagggcgcaagaatgatgatgcattgatttagactcctagtaataaattttagtgacctctatcagtaggcaaatgcagtgaactgtcagcaaagcaggtccccagacttctctcgagaatttttgcgttaacaggagttcaatttatgttgaggagtcgaaatttcttgtagcttgattcttgttagatctactggaaggtttggtttacagtgtaggagcacctttggtctactcaaatcctctgatgtcctcattgacaattttaagtcgcagcgaggcatccactgagcagaaaccattgttgatgatttttagaaccgccccctcccctgtactcatgttgtttgtatgcttactcatcccaataacatataccatggggaagagacacgttaatttaccaggtcttcctccaaatctcccattgccctttattaatagccttactagatataatcagacatagaacttcgttaattcctgatgagaactagtaactggggcctgcgatagggctcagtgaataaaggtgcttgccactaagactgacaacctgagtttgatccccaggactcacagggtaagaggagagaaccagctcccataaattgtctcctgacctccacgtggactctagtacatacatgtacaatctccacaaagttaataattaagatgtaaaaacagacgacaccaacaacaaagcctagtagctgtctgccactgatactaaaaccttggatcctgaatgttctgaagttagaaattctcttcaacgcgtttgccactattaaaaaaagagatgcccacgtgtccattatctttcagttctgtcaaacaggcttttgcagaggcctgtttatctagctgccgaatgttcagccctgtctgccggttaacccctccttcattctcttcctcttttccactttcaggttttgtgatgaactcgtaggcagttctcagagggtaggaaagagagatatttgcattagtagatcatgacctgctcagccctgataaaaaggaccagcagttggtggaagagttagaagactgttcactgaaataagatttgagtttgagtttacttttctgttttcctcttgtccttttcagaaaattgagagctcaccagacaaggtctggagagttcatctattagtatttagtgtattgatgttgcctggactacagacctctaagtggatacttttgtaatgttccaaaatagctctttggcaatgaattctcttttttaaaatttaatattatgttttaatttatttatttgtgtgtgtgtgtatgtgtgtgtgtgtcagagaacaacttccaccatgtggggaatgaactcaaatggtcaggcctgctggcaagcatctttccttacccaccgagccatcttgtcacctgatgtttctatttatttattttcaggaaaaattatgtttcctaaacattttatttttattttaaatcatatgtatatgtgagtgcagtgtccatggatgccaggagagggtgttgatcccttggaactggactcacaggtgattaggattcatctgaggtgggtgctgggaactgaactcaggccttttaaagaacactatgaactctgatccacagagtaacttttctagtcccctgactcttctttttaaaatcatgtttaggagtgatacttgttagttgatccttaaaataatgtcattcagcactgggatagagactaagcaggcacctttccctttattcagtagaaggcctgttgagtcaggtttccgaatgtcctggactgctttgacactgctttgtattaaaaaaaaaaaaatgccaatgcttagtggttgtggtgcctgtcattagtcccaacttgagaggggaaggcagggggatctctgtgaattagaggccagttggtctctacagtgagttccaggacagctaaggctgttacatagagaaatcctgtgtcaaagacaaacaaaaaacaaagaagtcacaatttaaaccatctgaggtggctacccctgtaatcccagcactcaggagctggaggcaaggaaggaagataagaagttcaagtttgaggctagtctgggctatgtgagaccctgcctcaaacagttcccgttcccaaatgctatgacttattcttagcacaaagtgcagtttccttgtcatgacagcttgcaaagtaatacctacatggactgatctcagcaatgataaagttagagggtgtaccaatgttgataaatgattgataaatgaggaaaaactagtgtaagagccaggtatgtctctggtaactggctgcttgagacctggctccatcatacttccattgtacttggggtcacagtagcccaaggctgggcctttagctctgcagctccagatgtttatgaatgtgttggcattaacccattcagagactggtgtcagagggtccacctttctgatgacctgcgtactcctgtgcaccattgagacattaccagcgtcaaggtttgggagaagcagagagccgtttaatgagcagagagtagacatgggagacatgacagtgtcagggaacatatgagtgacactgaagcgccttgtgcagctctgctgtcttgagagctttgttagtttttcccggtccccttccattacatcttgtctatgaaatgtttcccctctaattacctaaccactgcctctgtttcatcttctctatatattttcacttaagtagatttcatgtggtttgaaattcaaaaaaaatcgaaaagacaacagaatgaaaaatcattgtcctaaggtgacccatagccacctttgttctcttcctgagtataaccactgttggccatttcttacctgcccttgtcctatgtttgaaacaggctggccttgacctgtagctgattaaatgaactcctgatcttccttcttaaattcctcctgttctacctccccaaagcttgcactgccggcatgcagccttgtccccaatttcttaacctgtatatctgagacgagtttacatagttttggcttgcctgggacttgctgtgtagaccagactggatgcaaacttattgtgatcctcctgtctcttcctcccaagtattttacctcacctgcctttcattttaaatgtatgtgtgtgaggatgtacatgtctcacatatgtacctatgcatgtgcactttgtgtagaagcttgatgtcgacattgggtgttttcctcagtcagtctccagtttttattggggaaaatctgttactgattctggctaacctagccaccttgttctgatgatgccctgtgtctgcctcctgtacactggggttttaggcaggctaccatgcccacctggccttcaggtaagttatggggatctgaaccccagtgctcacacttgcaggctgagtgctttacctgctgagccttctcctcagcctccctcacctgatctttgagaggtgataatatgcaaggacaaacaccatcattttctttattttgtatatgtgtgtatgtggatattaaacaatgacattaaatgtataggttttcagcacttttgtgccttggatttttcaatcaacagtataatatagacaccataatgattctctgtccatgtgcacagaatggaagctctgtaagaaagagcttccagtgtttcaaggctatacacaggctgtttttctattaagttggtggatattcttgagtgatttagaagacagctagcttctctcgtggaagttatctttgaaaagtgtgcacaagggctggagagatggctcagtgttaagagcacttttatagagggactaagattgattgccaggacctacatggtggctcacaaccatttggaactccagttccagggatctaatatcctcctctggcttccatggcttccatgggcaccagacatgtgcatattggacatagacatctatggaagtaaaacattcttacacataaaataagaataaatacattttttttgtgtgagatagggtttctttgtgtagccctggctgttctgaaactcctctgtagaccaggctggcctcaaattcaaagagatcccaagtgctaggattaaaggtgtgcaccaccagtgtctggctatttttaccattcttgattttatttattttatcttaattttattcgttgcatttttaattttatatccttaaaatactctggttactggaagccctggttagaatgactcacagtaatcccctggtccttaagccaaaaccatttcctatatatgggagttctggcagttttgcaaatgtgctctacaggacccttgaggatagtctgggtgtttcctgcttcttcaaacatgtatggaagattagaccagggaatttctttgtgtgaaggttttcaaatagctttaagttttaccttttaaaattagaaatgcgaaacattttaattgtgtgtgtgtgtgtgtgtgtgtgtgtgtgtgcgtgtgcatgtgttcacctgcgcatgctacagcacgtgtgtgaaggtcagaggacaccttgtaggaatcagttctctgtttctgctgtggatcctgagatggaactcagatgggcagctatggcaggaaggagctttagctgttgagttatctcaccagcccagtgttaacgtttgaacattaatctttagctttccttctatttgctttatatcaatggctataccattgtttcttaatgtcattccttagaatataaactttcctgtcaatttaagtatttcagctatatgtctgtggcatatgataatgcagacacttttttttttaaccttcttgaggttaaaatccaccagatgtagacagaatttctgcttcccatttccagctctcttgctgtcatatcctcctctacctaaggtcagatatctttatgagcttttatagttgatgtatcttaattctcacagtcatgattatattgacaaggtttactggaagtgatttatcaaagctaccattaaatcatttcagagtatcaatatgaaagctgttccctggggggaagggggcacttccttgtttattctgctttccttgtaaattgcaccctgtggcaaagtggaaaagagctcactgtcgactggagattcaacgttctgcgcgcgcgcgtgtgtgtgtgtgtgtgtgtgtgtgtgtgtgtgtgtacatattcagtaatgtatcctgaagtgaaatgatcacgaattcaagatcatcctgagccagcctagtttacatgaagccctgtcttaagagaccaaaataaacaacaagaaaacaccccaataaaacaaaagttttgccgggcgtggtggcacacacctttaatcccaacactcgggaggcagaggcaggtggatttctgagttcaaggccagcctggtctacagagtgagttccaggacagccagggctacacagagaaaccctgtctcgaaaaaaaaattaatcactctgtgcccaacactgtgcaagggacatatgataggattcaaagatgaagtctttgatctcaaaggttttatattctaatggggaaatagatgtataaatcagataaccatggcattatgtccaggaacagcaaaagcactgaataaggcaaaaatggcttcctcaggaagtcacagctttaaagaggccattaagctgtgtctgaaagggtacacaggctgttgccacgtgaacttagggagctgtactgtaggaaggggaggcagttatgtacagagcctctgcagggtgtgcatttgtgtgtgtgtgtgtgtgtgtattatttagggtgatttaactacatattgtgtagtgtaagggttagaatttggtagctagtcaggggccaataaaattccacctctccaggtgacttttttatggctttgagattatgaatatgcattatgctttagacccttttgtttgcatctagcactgtaggtccatctgcttctctagtgggattttaagtcttacaggcatgaaatgcttggtggttgccaagtagtccaagagacttgagcattgagcctgtatcatctgtatggcagtgtacgttcatggatacacaaatttctcttaggagagcccaatgaaatgccagcagtcgtgctgtcacctccacagccagtgctgctgtttatgaagctggacgtgcccgtactcaagcaggccacgtgtggaatatttgcaatgtcctcttgattgtgtaaggtgcttccttggtagcaaatctcacttccagataaattagaaaactacccccttcctgccattgtcatctgatgtcattatgggatgtaggtggcagctttcttgggtacagttgtctatataactgttcatcccatgagtcattgtctgtttctgttcttctttctgcctgcgaattccaacctgaaaataatctccattgtggctgtgacacagtgttcattttgtacactgcatctgttttgctgactctgtgatagtgccatggagaaagggttagtgacatattaagcagttgactcttcagttatatccccattaaaaagatgcgcagcaagagtgttacattagcacgctggacattcaaaagcacgtggggtctcctgtttgagcaagtagctagtttaaatagatagaatagtagaactttaaggaagttctgtatggctcctggagggaggcagcttagtataccacacttagaaggtaagggagaatctctgtagagtaaaacactttaaaactcatttacttaccacatccctctattgttaagacagtgatcctgcattggccaactaattagttttgtggtgttaggggtttggcttgtcacatgccaggcaaacaccctgtcactaagctatatcctcagccaccccaactgcccattttgtagatagggtttttctatgtactcctggctagcttggaattcactataaagttgaagcctcaaacttgtgaagattcttcttctctgtctcctgagtgctaggatacaagagtatgccattatagccagcccacgttctgagacagagcctcaccaagttgtccaggttggtttgaacttttgaacttcctgtctcagtctcttaaattactgggattatagccctgtgcccctagactcacacccagctcagatcactttttcttttccttctgttctttatttcttttctttcttttcctcttttcttttcttttcttttcttttcttttctccctccctccctctctctttctctctttcccaggatctggtattttctagggtgttcttaaatttaatatgtagctgagggtgacctttaacttctgatcttcttatctccacttccccagtgctaggattataggcaggcagccaccacacctgactcacatgatgctagaagtcgaactcaaaatttcattcattttaggcaagaagttagtaactgcactaaaatatctctagtacgtagttaacaacttttttttttaagatttatttattattatatgtaagtacactgtagctgttttcagacacaccagaagagggcatcagattccattcattatagatggttgtgagccaccatgtggttgctgggatttgaactcaggaccttcagaagagcagtcagtgctcttaccctctgagccatctcgccagcccccatagttaacttcttacattgtgatttgccacacttcaaggatgtaagcccacaaggagaaggacttgggaccatgttcacttatcttccaagcaatgatagggcttggtaaggtcagactaagtatatcattaaatgaataaatgtgtgaattttttcatctgtacatattttcttctttactagaagaaaaattttataggacatttggataaaagaaaattattttctaaaaaataattttaaaaatatatttgacacacctactagagagtcttctcagtcaaggaccagttagggaaacaaacctgtagtcagggaactgggttcagctaagtggctgctgagatcccaggcatttgtggtatccaggagctactgtgtggctaaggaaacgagaaagtgccagaagcgatcgtaccatgtggcatgatcctgagcatggaaagaggaattgttggtggcagttggaacctaggccaaataagagaactcaacttcttcccctctttttccttttgtccttactaggacttctcattgagggaaattatgcagaaacccttagacaggaaaggctgggaaatgtagttggttccctgtgatagagtagaataagggtgggatccaagcactgacagacacaagggcactgaaaacatcttcaagttgtgatcattcccccacagcttttagggataagggctacccaggtaaatgtgggtaagagataggaacccaccaggagctgtgggtttgtttatcattttgttactcagaaaataagtttccatttttccagttctcagaagcctagggtctaaggcatatttattgccccaattctcacctgggtgactagtcagtgatacaaagatgcacaaagagttttgtggcagtcttaaaacatggcacagcttaatctctccttgatagtcaggcgtttgcagtggggttaattttttccttatgctgtgtgcctctttatctcggcttgtcagtgagtgtttggaggctggtgtctggtgtctcccaagaacttgggttaggttagtcagtactaggtgaaaaaggctctttgtgagtttgaggccagcctggtctacagagcaagttccaggacagccagggctacacagggaaaccctgtctaggaaaaaaaaaaagtgacatcactaagctaaatctatttccttctgtattaaacctgaaaagtatatagtcttgcgaggcacgtcactgctccatataaaggcaaagcttgccaagttatggctgctaattctcttcctgactataagagcatttgcgtaggcaatcctggttcagcactttctacaagtgctttttctgtgaatcaggtcacctgcatttgggctttgatcacgttaatggctttggtggaactaggccagcaaaaggtttcggtgcagtgtgagtatgtttggtttggggctgttactttccacagattaagggaatgtcattgtcaactatgagaatcacccaagtttcatttctgttttacttttattgatttctttttgacaggcgttcttgtagttcacagacacaattaaatgccatttgggttctatttatttacttttgagaccatggtcttgcgatgctaactctgaccgtcctgaactcactgagtaacccaggctggcctttaacttggggagtcctcttcccaaagacacctaagtgctaggatcacctgagtgatcctatgcctggcttaggttttatattttaaataataagtaagtaaataattttgatgaggctgagacggagcctcacataggtcaggctggtctcagattccctacatagctgaggataccttgacctcctgaccgtgctgtaaccacctctggagtaccggtgctacaggcatgcactgctgcagctagctgtgaagtgtttccccagaataccagttctttttagccagactactagtctttaaaggtacatctaaaaggcacatctgtgccgttgtaaagcttcatgttttatagtgataattatttcttactgtttgactcttctctttctcaactttctccttccctaccccactttttctgaatcctgtatttccccacaggctttatggatgctggtccactgatggctgaacggcaggtcctttcccagtggaaagccctagagatgagccaaattcacgtgtggccatccagcaatgtaaggttgctgtgggggttgtattcagttgtcaactctccaccttccccacactcctgcttgtgtggctgtaacctgccctggaatcccacttccccaacgtgtggcttgtggaggaataggattttcttttgttccttcttttcattgacagtgaacatagacgttgggcagtttttgcatctcaggttagttttaggtgcatagagaatacagttttgaaacatactaggttttacaagtccatgcataaagattttgttctgtccttccttccttccttccttccttccttccttccttccttccttcctctctctgtctctccctttcttcctttgtctctctctttctttcttttacatccactcagcttttacaggaaatgtattagtcctaaactggatctttgtggcttcctgtcattgtttttctctcccccacctaaatgaatgggtatggtcccattttgtggtgtatagaggatagtaaaggactcaggagggaggaatactgctctgcctgagtataattgtgtcccagcatagtgactgtagtgagtaaagtatctttcttttcctttctttcttcagagacctgtttctcttagtgtgctttctattgccgtgataaacaacaaatcaaaagcaacttgaacggaaaaggtgaatctggcttacatgttgcacggcccatccctgaggaagttggcaggagcagtggcagggcatgaggaaggctgcttactgacttgcttccaggctcacagtcagtcaattacctttcttatatggccctggagcacctgcccagaggtggcactgcccaccgtgggctagaccttggaacatcaatccacaatcaagaaaatacctcaatagacaggcccacagaccagtctgctgaggcatttcctcagttgagttccttcctgccacaattctagtttgtgtcaagttgacaaaacccagctagcacgctatcttttgcagcagttgttatggaaggcttgactgtaaatccccagcctctctccaaagtctatagctggggattcatgtgcttcaccttgtttgccccaagcgcacacaacttgatgttgtttttaacttcttcctcttttcttatctgactggaagtccccgaatgtgtagatttagaaattagttctcttgtatttttggttttgacttgaaagaatttgctttaatatccctttgacggttgtttcagttcttatgctgtttctgttttgctttgttgttgttattgttgttgttgttgttgttttgttttttgcttgcttggttgtttgtttgtttgttttgagatagggtttctctatgtagtcttggctattctggaattcactttgtagaccaggttagcttcagacaaagagatttgcctgcctttgcctcctccaagagctaggaataaagatatgtgtcaccatgcctggcacatcttaagttttgaaaaatcatttcttatagaactttctatgtagagtgtgaggtcttagtctgcagtctacagcctccgggtctttctattgctgttgatattttagttcatgtgctaactgacacagcctttaaagacgagctagcaaggacccttgtccttgtcaggttacaaactgcagagctgttggaaaggaattatagtgtcagagcagacttgagcaaataaactttcaacccatgttgaggagcctgactgaatctttttaattctttttatcaagtctgcttgattnnnnnnnnnnnnnnnnnnnnnnnnnnnnnnnnnnnnnnnnnnnnnnnnnnnnnnnnnnnnnnnnnnnnnnnnnnnnnnnnnnnnnnnnnnnnnnnnnnnnnnnnnnnnnnnnnnnnnnnnnnnnnnnnnnnnnnnnnnnnnnnnnnnnnnnnnnnnnnnnnnnnnnnnnnnnnnnnnnnnnnnnnnnnnnnnnnnnnnnnnnnnnnnnnnnnnnnnnnnnnnnnnnnnnnnnnnnnnnnnnnnnnnnnnnnnnnnnnnnnnnnnnnnnnnnnnnnnnnnnnnnnnnnnnnnnnnnnnnnnnnnnnnnnnnnnnnnnnnnnnnnnnnnnnnnnnnnnnnnnnnnnnnnnnnnnnnnnnnnnnnnnnnnnnnnnnnnnnnnnnnnnnnnnnnnnnnnnnnnnnnnnnnnnnnnnnnnnnnnnnnnnnnnnnnnnnnnnnnnnnnnnnnnnnnnnnnnnnnnnnnnnnnnnnnnnnnnnnnnnnntgagatttatggagtggggaggtggcttattttcccgagcattagaagctgtcgcctttaaaagcagagctaagagccgccattttttctgactatagcacttactcatattcataataaaataattggaaagtataaaaaaccagaatcatgcaaatgaaagctcctaaaattctcactcttgattatttatttgagtttgtacttcatcaatttttatgacattattatttcatttaacatttatcataggtattctgatgacattaaaaacatgtaaaaatatttatttatttgctcatttctttatttatctatttataaaagcttcctccatcatgggagcatgccgtcatttatgtaacagtaaatgttgggcatttgtgttttcagttttcatcattatcagtaatactgcaatgtaaatttctgtgctactactggactgataagttatttatgctttagtctaagtaattatgggtccctctaatttaaagaagttgggtggcatctcctgggttggaaccacttggagatgattttgctgtaggggctgccattctgaaagcttcactgccgttagacatctgttgaggcaaggcgtagagatctgggaagtcctggcggcacagggcagctttatgtgtcacatcacagcgggatgggtcagcacaccataccctgcctattgagaaagtgttgtcacaccatgattagccccttaggtattcacacacacttccttcactcaaacccatccactggcaaggcgggttagagtccctactgtgctaaaaaaggagtaatgattgctacaattttttggtttttaagcaaggcttttcttagattgtaaacaaagacaatggactatgtctcttgtgtgcacagctgatgtacactggctggcagtgtctctgtgcctaccacagatggtgcttttctgctgctgtgtgttcagatcttattcttctgatttgtaacagtccccttcacactattcactcggctgcttggagacctgtgacattctaggaagctgagaggtgaatctcgtggctgctttgtggtaattgcttctttgcagcatttcatttgtgtgcttctggcatctgcaccacatgaaagctggaggctgtcacgaagctgatcccttgccctctgtaggaggtttcagtgtgacacatcatctgggggaaagtgtagccagggggtgaaactggaggctgaaatagcagtgctttagcccttttgtggatgggagtaaatatttagacactgttctggtggaattaatagtatccttcagcagtcctagaagctctctttgtgcccactgaaacaggtttgcttaattgaagaaccttgccttgactccttggaagctgtgattagtttcttaagagtcctatcctcgtctctggatacagatctgtctctgttgggctggcatctttgccctaccccatgccaaatctttccatatgtaaatcttatacttgcttctgatgttcccagctttgaaatgccatgatgggtcttctgtgtgaaagggcaaaccttttgatcccttcccttttaggcagggctgttttagtgactaacattcagcatgccactgggctagccatttgtgctttcatctcagaattaatttctatgctgctgtttgtttagaaattaaagctgtctaacttgtttagatatggatgtgatttggacaaatgacattgttttttctttgtgtttgccattggttggatctactctgctgtgtggggaaagctgctccttttggaccacaaagttcatctgttggctcagaaggtttggtatagagctgctgcctgggggaaagcctgtgctttgctgggaccaagtgagaaacctcttgcctggctgcgtggtcctgagatccagggcacttgtccttctagatttccttttgaggaagtggaggagagtggatggaaagatatgattatgtcttcactcttagtctcagatgctacatttcctagctgcacaaagaatgaggtattgctttagtaactattattgagcacctcccattttagggataagtaaaaacaatctaattccagttcaactgatgattatttctttaatgaacttgaactctcggaggctcagtttctctatctgtgcttgaactagagagtctgtaaggttctttccaattttagagttgtacatttgtattagtcagccctctgtcactatatcaagaaattctggcagttatcttacaaagagaaaaggtttggggggagcagttgctattaacaggactgtctgtttttgcaaaggtcccaggttcagttcttagaatccaaatgatagcttacacccaacaaccctaactccagttccagggggtctgatgccctcttctggccttcacgggcaccaggctgtgcatatgttgcacatgcatgcctgcaggcaaaacccacatacacatacataaattaatctaatttttttttttaagaagaaaggtttgttttggttcatagttctggagggtccatccgtgacaaagacagtgtacatcatgactgcagcatgtggtttggcaaaaccaggaaacaatgaagaggatgagactagtgtctcacaacatcctctgatggcagacaccagagatttgaagacttctcatgaagccccacttctcatatgctaccccatctcccgatgaagtgctactcggggaccaagcttttgacacataggccatcaagctataacttgactctaagtgcctatctatcacaggacaagagaaaattttctgcagaattggcatattttgctatcttgcctgtttcgatctaaaggcttaagattgattgctctagagcagtatttcttgaccccagcactattgacattttggtaattccttgtggggattgccctgtgtattttgggcatttatcagcactccttggcctctagatgcctagcacatttccacctccttcctgtcagttgtgacggccaataatttccagagacatcagggttctcccttaaaggagaaagcactttggttgggaactctaggtccagagggacaagggttggaccctttcctttggatgtgggtgggctttactgtcagtttttatgttgttcttctatggcttttcacttgttttatcagcaggtttatattcagtgcttctctgtgcaggaaatgctagcacttgattatgagggacttagatgataataccaagttttgaaatatcaggtgcagctggctggctttgaagtggctatatagctattagctcagctgtccgtgcctactcatcttacctcaggctgctgttagtgactggctgaggtactgactgacatgtaggaaagcagttctgtgcagagactatcaagtcagcaatgtgaatcatgggtcaggactgggtcttgtgtgaaaattcagtgctatgtatggcagttagcccttcagctgcccatgaagaagtttaacttctcgtccttgtgtagagggagaggaatcgatcctacggatagagaataaaaagcccctcattggtttccatgtcatctttttctagtgtccccctcccagtgggcattctctctctggatttttcagggttttttccccttacttttcaagattataatgacatttcttccttcccttcaaacttcccctataaccctccctgctccctttcaaattcatggcctctttttttcattgtcattacatatatgtgtatgtgttctcatcctccctctctcctaaatacaacttgcttagtttatataatgttgcttatatgtatattttcaggactggtctgtctatctatctatctatctatctatctatctatctatctatctctctctctatctgagacagggtttctctgtaacctggctgtcctgaaacttaccccgtagaccaagctagccttgaactcagaggttcacctgcctctgcctcccaagtactgggattgaaagcatgcaccttcaccactggctaggttaaacttttctacctgtgcacttttgctataaaatagaagttttggaataactttgaattttctcccactgactctctttaaatttacttttcactgggtcagatacagaatggtgcatagtaaagtaggctgtgtttttgggcatccttgcagggatgtgctgggatcccggcaccatgactctgacacgagcctgtgttatgtgttagtccctgccctgggcttctagcaggctttgcttctagtccagctgagcctttgctggagtaattgcccacatgttgtcttcaagccaaacaatcgtttgtattgaggtagtactgaggtagtcttgctgtttggcacttcatgaaataacctccttcctgctcccagtgaaagcagctattttttattttccccttcccctttgcagagaagcacgtctcagccaccactcttctagcttattcataaatgctttaatcaggatctttgtacagagggaattagctaaagtcaaactatcaagggctagccaggggacacaaaacattatagacatctactactctgacattctatggggcttgtttaattgtaccattcctctataaaagtcattttcgcaaaaatattcctactagttttcatttatttagatattttttactattttatatcatttttaaaaaatatttttaaggtgacagcctatagacagaattctcaaaagaactcttaaaaattgttgggctggtgagatggctcagtgggtaagagcacccgactgctcttccgaaggtccagagttcaaatcccagcaaccacatggtggctcacaaccatccctaatgaaatctgatgccctcttctggagtgtctgaagacagctacagtgtacttacatataatcaataaataaatctttaaaaaaaaaaaaaaaaaaaaaaaaaattgttataaggatgctgaagtgtagctctccacagttgatggctttggtggggtgcaggtggggaaggactcagttttctctaaggggctggcatgggagtttgaccatgttccagtgagtatatgggtaacacaagttggaattttttttcttattattgttcttttttggggacaggagtcacaaaagttgaggagcagatttgagaggacttggaannnnnnnnnnnnnnnnnnnnttgtaccattcctctataaaagtcattttcgcaaaaatattcctactagttttcatttatttagatattttttactattttatatcatttttaaaaaatatttttaaggtgacagtctatagacagaattctcaaaagaactcttaaaaattgttataaggatgctgaagtgtagctctccacaattgatggctttggtggggtgcaggtggggaaggactcagttttctctaaggggctggcatgggagtttgaccatgttccagtgagtatatgggtaacacaagttggaattttttttcttattattgttcttttttggggacaggagtcacaaaagttgaggagcagatttgagaggacttggaaatgagtatgttctgcattcatgatgtgaaatcccaaaataataaaaaaatattatttaaaaaatacatttttaaatgtctatgagtattttgcctgcatgtttctaagtgtactgcatgcatacctggtacccacagagaccagaagaaagtgctgaatccctcagatctgagcccaggtcttctgcaagtgttcttaacacttagccatctctccagccctgttctgtgagctttttttttcctcccttcttcaaggtttcatgtagcccaatctgacctcaaattcttgatcctcctgtttctaccccacaaatgctagaattacagtcatctgctgccttatctggcttatgttttatttatttattttctgtgtaagattgtgggagggggagggagagattgagaaggcacacacatatcgatgtgtacaagccatggcatacttctgtaagtcagaggtcgacctcagcagttggtccttgcctttcaccttgtttgaggaagtgcatctttgtttaccttgcatacaccaaactaaccaggatgtgagctttcaggaattctcctgtctccacctcccatcttgctgtaggaatagtgggattaccgatgtgctactacgtcccactttacataggttctggagattcgaactcatgtcatcatcacgcccacacagcaaatatttaactctcagtctagctattttcctagccccagcttaagtttttgttttgttggttttttgagacagggtttctctgtgtagccttggctgtcctggaactcagctctgtggatcagactggtctctaactcacagagatccacctgtctctgcttcctaagtactgaaattaaaggcgtctgccaccccacccagctgacggcttaggtttttaagagttatctaaatagacagttttgtaacctaaaggaccagacagccagactgatagacagacagatagatttaaaaacaaagacaaaaacaaaaaaacaacgttggaacagctgtagatgagtgcccaggagaggctgagagagtaacatcagaaagaaggcttctgtggaaagcaacctagagcatgggcttcacacatggctttcccattagagagaatggcttcctaaaggcttctgggagaaaattttcagccaatccagaaagggcaagaagttctgaaagcctttccgtgtccgcatcagagtgtgtctggattgacttcagtccaggtgcttttcctcctgattcaccctttttctagtcacaaatttccagcattcacttagtcaactccaagaacagtaggtatactttacctcccagaacacattcggtcaaggcctgtttccttttttatttacagcctagttgatcctgtgctggggattcttttccacttgnnnnnnnnnnnnnnnnnnnnnnnnnnnnnnnnnnnnnnnnnnnnnnnnnnnnnnnnnnnnnnnnnnnnnnnnnnnnnnnnnnnnnnnnnnnnnnnnnnnnnnnnnnnnnnnnnnnnnnnnnnnnnnctattctatctggcttggaccgagcctggccttgaacatgttatgatcctttttgctgtgtgcctcttttaaaagaaagtgtgcttaagtgaaagaggttggcctgtttaaagtatactgatttttgttttccctcttttgcctttttttagacaaggtcttgttgtttggtgtccaacctgacccaaagctcacagtccttctgcctcagccccttcagaagtgagatttcaaaaatggaaatacatgtctagccttttcattcaattttactatgatggctggacttgtggtgcccacctttgatcacagcactggagaggcaaaagcagaaagatctctgtgagctccaggacagccagtactacacagaacctgtctcaaaacaacaaaagcaaaaatccaatttgaccgcactcagtggtttctaagcttagagggctgtgtgtctactggaagcatcttcagggtctccttggttagacaacccatccagtatcattgagttcacacgatttttcaacacaggcagggaatcttttggccaactttttgttctttccttaaaatatgtcttctctttatttaaaaaagaaaatcatagcagcacataccagaatttccctaggaaatgccaagagacttggccccatcccaaggttttagatatcaccaccatagccatgcacagctacccagctagaaagactgttttttcctttgttgctgggggttaagcccaaggcctcttgcattttttttttttaattaaggcattactgacatgaaaattgcatacacatatatgagttaaaacatggtgtttccatgtgaatagctatagatttttgtggcagataaaaagctcttgtggaatcagtaactcaccacatccaggcacttctgtctgatgcgttctgtcacagagtcagaagacaccttaggtgtctgtgagtaggaattacactctcaggctcctctgggtcacaggagcatgactgctgtcacaatcttaggagaaagtgatgccactgttggaatatagaaacaagaagagagggtaatgagcattggttctagaaagacctagaccatggaagaatttatgccatacttagttgacagtggggttccaggtatatggtctctggatagaatgaccaccagaacattccttgtaggatatctttttcagaccaacaaaaatatgaactaggaccttgccctttccttcgtgaagtctgaagactacatttcagtaaaaatggtactgactggttagttccacagttagttatcaccagaagcatcagtaggtatatatactaattactattccatacaacctaacctacttacctaatcctactttcctagcaataataagccagggaaataagggtgatttggagctaacttattgaaaaataagcactttatttatttatttatttatttatttttgagataggctttcactgtgtagccctgcctgccctggaattctttctgtagactaagctagcttcaaactcacaaagcttctcctgccctgcctttcaaatgctggggattaaaggtgtgcaccaccactgcctgggttagaactttaatgtttcttggtgttgcattttgggattttattgggtgtatatgctagagattcatctcaggacatcaaacattctaggcaagcactcaaccagtgtttcctctcccttaaaatttattattactattatattttttttactttaagacactgtcaaactaacctactcagataggccttgactttgtaatctttccatctcagtgactgggattacaggattgcaagtagctggtattttaggaccacaccaccagacctagcagcttaatgaattagaggcattataactatctttcacaagagctagattttagagataatctaatctaggcaaggaaattgactctcaaagaattgaactgacttaaagtcaggtagcatagttcagataacacttatctttagctctgtggattgcaagaatcgggcagatgaacccagatatgtacaaacatgttactggctagtttagagcaagtatgaggtttcctagggttagcagaaaattcttgctgatacttcctggaacgttggctattagattgctttggacttgtattcctttctgaaatccttgtatgtttttcagtggtattttcttttgtggccctccctggcctagagctgaggaaagccaagggagcgtcacagtttgtaagcaaggctaccacttttgagaaagactaagaatccttcttttcttctccaagacctcagttgattgcttgatgttaagaggtttcgggtgttttgagaaaagccctgtcggctgctgaaatagatataggtctacattggctatcatttcgtcagtgagtgctcagtggtgttctgtttcattaacctgcttttcctagttacctgggagatgtgaggttgctttgcacctccactgaagtcacagcactcaactgctgcatctgttcccaatgactgatcaccttgattaagttgactcagctggcttgtattttggtcaaatataagaaatggagctctcctctgctagaatcgctagcctctaccattgtcttgcatatttcatgtaaaactaagaggagtgaagagcaagctctgggagatggaagtggtccaggtagatgaatggaacccacccagagcaagccctctctctgtaagagtctgtgccgtctaacaatagaaccagctatcttttgagatggtccctaatttacttgtcacttcagagccaggtgatcacctgaagcagtggttcacaatcttcctaaagctgaggccctttaatacaggtcctcatgctgtagcgacccccccaccccaccccaaattacattgctactgtaattttgctactgttatatattgtaatgtaaatactgatggtatgcaggatatatgctatgaaagggtcatgaaacctctgtgaaagagggacacaaagggggactgacaagttgaaaactactgacctgaagggtcccctatatccagtggaatggctgggcttagtgaaatccaagattctttgtaattctgaacctttttttcttttaatgatttattattttttactatacatatgcatgtatgcatgtatgagggtatcatgcatgctttcatgtatacatgtatgagggtgtcaattcccccggagctggagttaagagacaattgtgagctgccatgtaggcattgggactttatcctgtgtcctctggaagaacaaccagtgctcttaactgctgagccatctctgcagccctgtacctctgactttttacttcttagagtagaatctccctcatccctaaagtgacctgagaaatgtttccgttttctttgtcttagacatttaagaagtttcacttctactcttttcttgactttgtgcatgtggatcatgtgcctctctgacagacagaaacattcttgcaagcagagggaacagggcttctcttgtagaacattctgagagcagagcttgattgagcaagccctatttcagtctcatggttccttaaactgacatttacagaagttactgcttactgtttattttggaatagggaattggatggatacttttttgaataaataaaagcaggctgggaaatatgcctcttgtatttaatttcccacatcaacgattaatcaggaaaatgtctcataaacttacttacaggtcagtcttattggggcattttctcaattaagatgctctcttcccagatatgtctagatttgtgtcaaggtgacgaaacccaaccaggtcattatcacatttaaattagttttcagtgctagttccaggctcatgaactgaatttgactgttttagttccattaataattaatatgtctataatttgataattttgcttggcatttataatcttgttcacacacacattcacaatgtacatgcatgtgcatacaagccatggcacacatatcaagatagaagacaactagaagaagttagctctccttccactatgtgggtttctcatcagacttagcaacaagtgcctttacctgctgagccattttacagccacatctggcatttttaaaagccattgaatgatagtcaagaagcatgaagttaatcttctcagtctgaatggagtagctagggtattagtaaagcttagagaagattaactaaagaagggagacgctgcatgtgtgtagcactgtcccagaggctgtgggcccagatagaatggaggctgtctagtgcaagcattccctctatccttcctaaccattgtggtgaagtgtgctgttttcttttcaccatggtggctaaaatctgaacctgtgagtcagaataaatcattcctccctaaattgttacgttcttgacaaacaatgacaatgtcatagtgacaagaaagggactaacataggaaaggagcccctcacctccacccctccccaaattcacctacagtgcggggagggtagctcagtggtagagccctggcctagcgtgtgtgaggctcaagctgcagttctcatcacaggaaaagagatcacctccaaattatctgctagagttttaacagtggacaggatggaagcttcactgttcgcctgttcactgactttaccacacaggctcattctctgccattcccgagagctgatcctagcctctgcccctggtgggacttaaccgtttctgaatacgctgcatttgttttcatacaacttgattgttagaaagttctttccagagcgtgctacaaccaccatctcctcacgggtgcagttctctggcgcctcatcagagttagcccatccctctcctgtgactgctctgcatgttgaaactactgtgtccttttactgataggctgagttaaaagaaaacatttgatcccacttctcagagctatttagtgtgtactttggatacttttcctggatagcaatattagaatagattcttacacggttttaatactgaattttaaaattcaatgtatcatagaagtagttctcatctttattttttttctttcctttttgttttttgagtaaggtcaaatgtagctctgatcttgaactaagtagaccaggctggccttgaacttccagaaatccactgcctcaacactgggattagaagtgtgcactaccacactcaacagaacagaactatttctgtatcaagcagagagctaaacatttgataattcctttatgtagtctaccaatatagtttgtagtttttagaaagcaacactaagtcaggtaaagtgactcatagtgtcagtacctgaggggccgacacagcagtgccctgtgaggtctcggccagttgggctaaagtttgagaccctagttttttgttttgttttgttttgttttttaatcctaaataaagaaatagaaaatgtaataataaacttttttgaggagtgggggagggagactggtctcactatgtaacccaggctagccctgaattcaggtactgggatacaggtatgtgccagcatgcctaacagtaatgaacagtttaacaattgtatcctacctgcttttcccttgatacatttatttattttagaatattttagaatatgagtattctatctgcatgtataccagcataccagaagaggacatcaggtcacattacattacacatggttgtgagccaccatgtggatgctgggaattgaactcaggacctctggaagagcagccagtgaccttaaccactgagctatctcttcagccctggatttatttacctttaaatgtgctttaaaaaaaattctgcttctatactatgtgcagggagctatgctatgccctaaggatgacagtgagtgacttcaactcttgtgacacttatagtttggcaggaagaaatgtggaacaatcacaatcataagtacataacaacaagcacagtataagttagaaaacacaaaggatcaagctcatagcacttaaaaaaaaaaagcccaaaacactactgttttaaagatgtaggctgagatatgctcaggtagaaaggtgttggggtttatatacttctttcagttgatctatttgatatgaggtttgtggatggagatgtgggctggaatcgctgaagctggtggttaataatgctctgcttttgtgtagttgacatttcctaaaataagatgtaagatgaaaaggaagagacaggaggactatgaactagtgcagatttataaccaaggaacccgggcctcccagctctgaggcagacactgctgctgagctgtacccagcacaacaggcagaaaacatgttatgtgaaacagtgtgatatgtgaacagtggtgactggtggtcagggaaagcctttgggctttggcaacagcaggtacaaagccttcagacaggacagactggtgccttgagggcatgagagaaagctgggttgagtctagccatgggaagatacacaggaccttggaggataggtagttggtacacacctctaatctcaggactcaagaagccaaggcaagaggcttgtgttacacagcaagtaccagtccaccaagggctatataacaagatctgtctcaaaaataacaaaacaataaaagagtaataataaattaaaaggcccttggagacatgtacaacacatatgcgtgacattcacaccagtttacatttttacctcaatgtaggaaactccatggaagacgatagtcagaagtctgacctgtacagacttggattttagagattattctgggggccgatttgttattggtctggtagtgtagcttagagatagaatacttgtccagtctgtctggggtgctaggttcaatgcccaggactgatagaagctctgcctttgtatccttagtacctaggcctacctaggtagtccataatattgctaggagaatgagtgcttgcaggtgagagatgagacggtctaggtagacgtagcttctggagcagagggtagttcatttgatggagtgcttgcctagcagtcacagaggcctgggtgtggtgcataccaccacataaaacctagggtggtagtatacacatgtgataccagcacttgggaagcatcgttaactacacagtgaatttaaagctgtttggggtgacaaagacaccctgtctttaaaaaacagagggggactggagagatgacttagtggttaggagcacttactgcttttgtagaggactgaggtttagttcccagcacccacatggtagattacaaccatccctaagatgggtcccagggaaaagggcaccctcttctggccttcacaggtaccaggcacacatacagtatccctaaatacatgtaggcaaaacgctcatacacataaaatgaaaataaataaatctttttgtttgtttgtttgtttgcttgtttgtttgaagacagggtttctctgtgtagccctggctgtcctggaactcactctgtagactaggctggcctcaaactcagaaatccacctgcctctgcctcccaagtgctgggattaaaggcgtgcgccaccaccgcccggctaaataaatctttttttaaagaaaggaaatggatagattcaggaagtttctgggtacaccgaatagggctagacagaaaatgaagagattcttgcttcgcacgtccctgttaaccctggtagctctggtgggcatggggtcagtgacaagctgcagtggctgcagcaggtattcagggtttagtgctgtccagagtggagtacaagctggacattgcttgcatgctttccaccagctctcaggcatcagagtgtgtgtgtgcagtgtgtataagcccagatttttccttactaggtggatatattttacacttgattttttaaaattgatcaaccaaatctacctgctttctttgttttcatgagttcttcatcgcagaacgactcctgtcagtgtgaagtaggcagtacctccagaacctgtgctgtagctcctgtggcgtgtgctccgcagactccttttgcgtccagaaccgttgagaacattactttgcatcacctctttccaggcttagtttcaggatgatgtctctgggagagttgcaggatcaccaggtgtaagcagatgctgcaaggccttgcagcagtgatgtcaagcactgtggaatctgagcatcccccatccaagctggcagcttggacatctgtgtatgagtgctggcacatgctggcacaaggacaaggattgcgtgcagaggatcgcagccagggcggttaagttatatgctttggactattttggnnnnnnnnnnnnnnnnnnnnnnnnnnnnnnnnnnnnnnnnnnnnnnnnnnnnnnnnnnnnnnnnnnnnnnnnnnnnnnnnnnnnnnnnnnnnnnnnnnnnnnnnnnnnnnnnnnnnnnnnnnnnnnnnnnnnnnnnnnnnnnnnnnnnnnnnnnnnnnnnnnnnnnnnnnnnnnnnnnnnnnnnnnnnnnnnnnnnnnnnnnnnnnnnnnnnnnnnnnnnnnnnnnnnnnnnnnnnnnnnnnnnnnnnnnnnnnnnnnnnnnnnnnnnnnnnnnnnnnnncacccccaacatcctgaagtattggacagcgttggggcgacatgcgtgagtctgtttactggtcccttcggtggagattgatgggaagtgtgtcctggaatcctcctgtatcgtgttcttatgtgcaggcgctacttattgttgttctctctgtttaggcaatttgacgtaggtgttataaaacacattttatagatggagaaactgaagcctgggaagtacaagtctctcaaggtcatattggtaatcactgatggagccgcagtcttttctgacttcacagactatacttttaataactataccatttccccacattttcagccatataaactaggggaacgtgttgaagcttgaggcccaaagtctagcgtattaggcaagggctttactactgagctccactcctagcccataagtaactttttttttcttccttggtttcacggactcttatgggttgtgtagttggtgactgttataagtctagttgctcaaaactgaaagagaactcaggttgaagggctgtggttgagctttagcctggaatgcatgaggtcattggtttagactcaggttcagggaggtcaggtgagggagagagaccgagtaaggtagaaatgagaagtgtcaccatctcactggcgaagtgtgggagggatgctgggagggaagactgtgggggtgggagaggaagggaggctgtcacctggctgcttatgaaaaggtagttgcctgtatttctactctggggtctttgcaagtgtgtagactcagggcaggaagacttttaagactgtaagtgtctggagatcccacagtgatgctggtatcttaggtgactgtagactgctttctcttgacttagacccagaatgtagatagcctaatcttccatagctaacttctttccaaaaattttattaagtttgtttgcttgcttatttatatttattcattgtgtgtgtgttgtgttgtttgtgtggtggggtcctattgcatgtgtggagaccagaggacagcttgtgagaattcattctgtccttctgtgtagattctaggattgtattcaggtcaccagcctcggtggcaagtgccatgacctgtggagctatctcactggcctcatcttagctatctcgatttcaagactctcgaatctagaacacagaaaaaatgccaaagaagtatgaaataattgatatttatttggttgatcccattaaaaaatgtaaagatcatagggtagaaacaaaaccagaaattcacaccatgagaaacctccttcacgttggtttggctctttccttttgcagctgtatgacaccccactaccaggaacaagtatgtgaggcgttgtgtgtctcggagtctgtgggagactgcgcagtcagctagggactagagagattgaagatctttcagaagataaaaacctgaaccagtgaaaatagcaataaacttccaagcagagagcaccccctggtggtgacgaggaagacttgcacctcctgtcattctgtattttgccataatggactttacctgaatcaaaatagtctctttctaataataattatggattcagatttctaagagttcccacgagactctagcatttgtttatcaatactgctgtcaaatatctcaggctgggcaactttcttattccaagcacaggcctgctaatctctgtagaaagccagcagcattggcatcacttcaacctctaattgtgatactgtgctgaatccatgtcattagtttctgaggaacggtggagaaggaaccatgtcagatttttcagtcagtcttggtaactgtcatataagtctttttccccccatataaaattatgagaaacagtttggagattttgcggaggtattattagggtaaagagaactgtcaggggataggagattctatacctttttttaaactcatgtgtgagatttctctttgtactaataagctttcaggtaactacattatctggcaattctgaatctagataattctgtagttgggtaaagtagggacatcagcccggcttagggatcttgttaggttaatgtggatgcatattttataggctggaggaaggagaggataccagcgttttcagtttcagcatgagcctggctggcctgcaatgcatgtatcctttttcctaggaagaaagctgaatccaggcccctcacctttacagcatcttccactgttggtgtaaggtgccaggttagagagacttagatgtggctttccaccactctcctgggagttttcttcatacaagtgacaaagtactatgacatgtattttagcactgattagacactaaaagcatgtcttgtgccttcacgttacatagttccatgtatattagatgtctgaaactggcaagtcctaggcagaaagtagacctgtgattgccagggactgggcgctaagggccggtggggagcagggatacagagtacctactagtaggtttgggatttgagtgataaaacttctggatttagagtggtgatcaccatgcagcggtgtgactgccctgggaacctctgtactgtatactcagagtttaagctgaaagtcaaataaatgttgatctacaggaatgaataaagtcagtaaaaagggtaattgcagtaaaatctcatttggttttagccaaaatgctgcttgataatactaagtagcacagacgagcattctcataatctgtcctgtctcgctctccacagggccgagatgggcctcctgnnnnnnnnnnnnnnnnnnnngggccgagatgggcctcctggaacatcggggtgttcatctgcattcggtgtgctgggatccacaggaatttgggggtgcatatatccagggtaaaatcagtgaacctcgaccagtggactcaagaacagattcaggtaccagcacagcctttagccagcttctcttgtacccatgtaagagcagtttcaggttgaatgctaaattgatcatgaaggtgaagaaaaaggagaaggaaaacttaatagttgtcaaacacgtttgtcaaattctaatttttattgtatttatttacttatttgggacagggtctcactgggtggcctggaactcatagagatctccttgctttaccctctgagagctagaattaagagcatgtgccactgtacccagcaaaattttatttttcttgttgttttgtgacaagcaagcctctaactctttctgtacttaccttagcctcccaagaactgagattataggtgtgtttttctattagtaaaattattattcttttaagatggtgggacctttggcagttaccgatacaacacttgtagttttagatgtatgtaggcagccatttaaaacacaaaaccacaaaaaacactttctgagctaagggtatagcccagtgagggagcgttcacctaacctgtaggaagcttgctggttttgatccccagtattaaaaagaacaaaccaactttcaaaccatagactactcattttcttccttgtttagagattgagcgagggcctcacatacactaggcagaaactctaagctgtgcccctgagctatgattccagctttagcataatgttatgttgctaaaatgcatgtgtaaatctagcttcctgtcagcttggtggcctggtggtgatacataaactgatgctacccaagagccttttagtgtaactaattgttctttattttctttcctatgttgaaacccttttttgaagggtttttttcctccctttttttggtgtgtgtgtatgggagagggggaggggtattaaggaaggaggatataaagaaaaccacttgctaaagttaatggtgggaataggaggttttgtttcatttgtgttggaagaggtcttattgtgttagaaatgatctcagactgtacttacagaccattatagctctaaaatggtgagtgacatatttttttcctagtttcatttctattgctgtgataaaataccttgaccaaaagcaacacaaatgaggaaggctctaggttacaataggttactattctgggtgagtccaggcaggaatctgagtagtttgtcccatcacacaacatgcagaggagggagaagcaaatccatgctgctctctgctggctttcgcctatcttagtgctgttcagagacttctgcctagggaatggtactgcccacaacgggctgggtcttcctacatcaattaacaatcaggacccttctccacagtcatgcccacaggtcagtcaggtctacataacgcctcagctgccactcctttcccgggtgattctgcattgtatcaagctgacaactaaaactaacctgcatggaggactatttaaatgctaaatggaaaatacacttattcataacacaactaagtaagttagataaaagtataagtttagaagggctgagggtatagctcagtggtataacagttgtttaccaggtacaaggccccgagttctagtatcagcactgccaaaagaaaaaacttgtattaacttagaatttatactacctgttagtgctggtcttgtagaaatctgatggatagcaatgtagcttgggttttcaaatgaattattcctgaattatttgtgtcttttagacacagctttcaattagaaacaaaaccaaaccaaacctgagggaatcagaggctatcaagtcccagggaattagatgtccttttctggctgcacagacctgtggagaggaaaaagctgtgggggggaccaaatgttgggaaacagaacccacaagtttaagccttgcttgtgtcactctctgaagctgactcttcatctgcacagtgggaggactgggctggatgagggcacctcctggactcacctcctgtctcttcgttgtctttcattgcagtgcatgcaagagatggggaatggaaaagcaaaccgactctatgaagcctaccttcccgagacctttcggcgacctcagatagacccgtatctttttggagtgatagctgagtgcagttttgatgtttgggaagagccaggagaccttcaaggcctgagataagactgtgccatctctgtatgaattagcccaagactttggtttttctctctactgcaaccaaaacaaaaacgtgcttatgtgctgacattgggactagcacctagcatcaagtaggaaaagctagggaattagggctgcagtgactttactgtgagtccttccaaagagtgacagctccaatagtttgaatctctgacactattgtttgacaagaagaatggcttactgtgctctattgaaccctggcaattggcaaaagtggcactgctttgtaaatatcttgtataaaagtattgactttgactggtttatcaatattgctcttcctccattccctcagcccgggctgacagacacagagcaagcccatttgaaggtagtgtttctcaaggaactttgcagactacctttttagggtttgatgttggtgggacctgttatgagaaagagatgtgtcagtcagagtctggcagcagagcctaagtttatttttgagagacttttaggtgcctttgaagtctgttgatcaagggccttaaaacagatcattgatttctttccctgcatcagccacagaggttaatcccacttgctgttgtcattactctaaagggaaaccaggaagtggtgattgcctgcagtaagcttgaaggagtgatttcaaggttttggtcagggaaactgtatatgaagaagcaggcgtcctgtggggggaaaccaggcagaaaggaaaggggagagcattggcatgggggacaaattgatcttttacattcctagtgatggagacacggtttttgattcatccttaataagtgtttgtagagctgttgaaggatttattcgagataaatatgagaagaagaaatatatggaccgaagtctggacatcaatgtccttagggttggttgtaaatctttcaagttttgtttattactaataatttactttttaatcaggccagagaagaatttgaaaggcttccacttaataaacaaaacacaaatggaagtagcaaaatggtcccaaatggccagttaataaatgtgaaagtagcctgtcatggcagtgcacattttaatcacatccaagacaggcaagctctgtgaatttgagaccagcctggtctatatagcaatttcaggccagccaaggttacataaatcaggccctgtcttaaataaataagcaaactaaagtttacaacaaaaaaacaaagaaacaaacacatacatacatacatacatacatacatacatacatacatgtaaaagtaggaaaaagccaggtgttgagtcaagcctatgatgtggaacatgctttgagccttgctcagggacaggctgctcatggacaggcacaacaaccatcagaggatcctttgccttgatctacattgagaagtgctactatttctcagtaccaaattctttcttccctccctcctccttttttgagtttttgggacagggtctaaccatgcctggcctcaaactcctgcctctactttccaagtcctgggaatataggtctctcccacatctgactccacattccttccttaaaaaaaaaactatttagttgtatctgtgtgtctgtgtgtgcacgcaccaacgcacacatacgtgtgcatgaatgtcatgctttacatgtggaagtcagaggataacttactggagtcacatctctccttccaccatgtggattccagaaagtgtgctcagatcaccagccaggttcttacccactgagttatctagctggtcccaaattatttctcaagatggacattttgaatataataggtcaagtagaatgatatcatatgtatgtatatgtatgctttaatatatatgcacatatactttttgtttataaatgatgctaaaaggagcaggtctgtctagttaaatcatcactgtttccttcagtctgaccagcatatccttccactctgatatactgatggcctctcattggactaattgacagtgggacatttcgtttttactgggaagagtttcagaggtatatgagttgcagttgccaagtgtatagctgggacaattacaccacacagtggggaatgcaagataattttagataatgatgacaggaaaagcagcagagatggcgctagccctaatgcacttcgaatccacctgccatccgtcttctagtttttattctactgttactttagtcactttctggtttgccctgtgaggactgaacccaggctcatgcatgctaggcaagcactctaccactgagctatcttccctttaggtgtttattctaatggatgagacaaccagtgaaatcactgtatttgcatggggctccctaagctatttcatgtaaaaagccttcccaggtcaggtggcatgggcctttgatctcagcactcaggaggtagaggcaggcagatcttcataagttcaaggccaaccttgtctacagagcaagttccaggacagctgggcataaggaaactgtgtcccaaaaagccagaaaagccttcccagacaatgaaaagttaagctaactggaaccatctgtagatggatattcggcagggaatgagaaggacgttacctggtgagtctctataggcaaggcagtacatgtattagggaaaaggaattccttgccaacttaatatgaacaactcaccatcgtctggggggaaaaaggcttgtcagttagcataagtgttccgagaaagaattagccccttatacaccccagagagcaccatccaaacgaattttgcaggcctggagaaatagctcagtagtcagtagcatgtgctctgtagaggaggatgagagctcagtccctaacatccacgagacagcacgcggctgcctgtgacagtctctgcttccctgggatccaacacctaagttttagcctttgtaggcacttcgcactcacatgcacaacgtaacccctacacacacacacacacacacacacacacacacacacatcattctaaagtaaaataaatcttttaaaaagagtttagaaccaaagtgcacacgcatttcattttatttgtggaaaagtaaaagctatgttcactgtgctgaagtatatgaagtataagatcaaatgatgtcagagggtatgtagagagacccagaaggtagatatggggaggctgtggcaggaggacactccagcgatggtcttggcattgctgtagcctcacccacaagtgttcaggtgggaaagaaagactgagacttttagtttttttgctatgcttagatgttctttcattcttgttataacaagaattgatagttatttaagtctccagcaccataaataaaaagaatatttttagcagtcaggatggtagcacatacctataataccagcctctggagactgaagcaggagaattgccacaagtttgagatctacatagtgtctgtctctgtctctctctctctgtctctgtctctctctctctctctctctctcttaccttctctcatcctctcttacccctacacacatagaaagaaaaaaaagaaggaaagaacattcattaaataaaaacaactagttgtttcttttttttttaagatttatttattatatgtaagtacactgtacctgtcttcagacacaccagaagggggcatcagatctcattacagatggttgtgagccaccaaatggttgctgggatttgaactcaggacctatcagaagagcagttagtgctcttacccgctgagccatctctccagcccaaagacaactagttttaaacaaaaagtaactggctttgctaaagagatctcgtggttagtgtgcagtgggagagatgtaacttcaaagtgttgtgtacattggtagcgttctgctgaggtattgccccccgcccaaccccatctaaatgtctgcttttcatttttatttgtttgggttttgttttgtttgctttgttgttgatttgagacagagtctcactatatagccctggctagcctgttactatgtagaccaggctaatcccaagctcacagagctcctcctgcctctgctttccgagagctgggattacaggtgcacagtgctcccttcaaaggtcagattttaaaaaaaaaaaaaaaagacaaaactttgtttaacttcagtatgtagtagtggtctgctgggcataatggtgcctgcccatctatcatcctagtggctttgggtataaacgcagaagaatcaggagtttaaggtcaacctcggctactagtaaatttcaggccagccttgactactttcgtctttatttccaaaaacagagacaaaaaggaaatagtgttctgtattccagtgccaattctacacaaaaagacagagtattatgataaagttatttttacaggaaatatgaaaattaagaggaagaacccatgcttgttctcgttgtcccctaatgactcatctgggtgtgtgccttcctcagaggcataaccagaatctagttataaaggatgtctcctcgcaaacatctcacatggtgtacatgctccatctatatttctgtggtcattgttgcatctcctgctgagcagatgaaacagtttctttcccctccattagcaggactgttgtcacttaaggtttttgttagcatttctgggatggacagcttagtggtacatttgactttttactatagagtcttttggaaggcttgagatagggtcttgctaaatatcccagactggtctggaactgactctgtagcccaggttgtccttgaactggagatccactgcctttatatccgagtgttgggattctataccaccaagccctgccagattgtttccatctctctctctctttcttcctttctttcttcctttctttctttctttctttctttctttctctgtctgtctgtctgtctgtctgtctttttcttccttcctttttctctctgtttgtttgtttctttctttcttttttaaatgtatattttcttatttttatgtatatgagtgatctgtcttcacatataccaggagagggaatcagacccaattacagatggttgtgagccaccatgtggttgctggaaattgaactcaggccctctggatgagcagccagtgttcttaacctctgagccatttctccagcctgcctgtgaactttttaagtgcaggcaagtttgtgtcactatgcccagcctctagctttgtttcctaattttaaaaatagaggtgaaaaggctggagacgtggcccagcggttaagaaaaggctggagacgtggcccagtggttaagagcacttgatgcatttacagaggaccagagttcaaaagagcaacaaaaactgagagagattttcttgtatggggattgttgttttgagtatctttgttgtatatcctagactggtctcaaactcaaaattctcctgccacaatgttctaaatgatgagattacaagcatttaccaccttgcctgcctttagtatttatttcttgagacctttttggctgtttatagttatgtataacacataggagataaagggcacaaatgtgtggcaacttttaaacttccatagattgtctgtctgtattacagatttcaaaaagggttgagtccttaaaatgtggggtctgcctcattcagtaaggaggctaatgaggaagatcagtactcacaccccacaccaaattggttgcatttctgcatcagaatctttagtgaactttgatgccctgcctgcatttggattgtagctctgaaacactaattgtgctaaggctaagctatcattgtcctgttacatcactttagaaagagaaggatgataagtggaaacgagggaatgaacccgctccggagaaaaagatggaacctgttgtttttgagaaagtaaaaatggtaagtggggagcttctcaccatgtgggtggtcccatgtccacacacgaacctgcaggaggagagtggcgggcgggaggctcagcggtgcgcgggtttgaaaccatactgcactgttgcactgggactaaaggcccatagagcacctgctgcttgcccattgccagttgctgtctaatgtgctctatagcttttcttgctctcttattatctagcaccccctgctcccttctctttccctccctaccccatctctcctctcttctccttctatcctttttttaaaaaatttcttccttccttcctttctttctttctttctttctttctttctttctttctttctttctttctttctttccttccttccttccttccttccttccttccttccttctttccttctctctctctctctctctctctctctctctctctctctttctttctttctttctttctttctttcttcctctttttttataatgagagaggatttcactatgtagccctggaactcattctataggtcatgctagccttgagctcgcagagaccttcccacatactgaggttaataaggtgccacactacacctagcttatagctcttctctatgacaggaagccagatggacgcttagggactctctttcccttctgagcatgatgcctgctccctgccagtgtgcagggtcaatgtgataccttcgaagcagatgttcgttccctctgtgttagtccttgtcagacttcttgcctcatctccctgttgcaccttggagtagtgcagaagtcaggtcatgctcccttcttcccctggcacacactatggctgtgtagtagattctctaggggcttataatcataagagaaaagattttcaatttttttctaaaggcttgtttatctttgtctgatgtatgtgaatgtttacctgcgtgtgtgtatatgtgcaccacatgtgtgcctagtgcctgcagagaccagaagaaggtattgtgtccccctagacactagagtctagtctagagtcaacatgtgggtgttggaaagtaaacgtgggtcctcttcaagatcagcctgtgtttaaccattgagccatctcttcatcctcaagagttttatactattgcttaaggaaaaaccctttcctatcactatgaatctcatctgtggaatcagtccattttgattatggcagagtagatctgaactctttaaagtgatctttagaataaactaaaaggctttgtgttcccacatactgaggctaagcctctccaaacaggccaaccagggcactgtttaccagggctctctctcacttccagttccgttcatgcactcatgcttcctggcacttcctgagccttgtttctttggtaactgtctttgacaaacagccataccacaagaatacctgtggcttcacagtgatgggggtacgcgtgtgtcaaaaacaactgcttgctcttttttataacatttttttcatcttagccacagaaaaaagaagacgcacagctacctcggaaaagctctccgaaatccgcagcccctgtcatggacttgttgggccttggtaagaactgggctttccagctcttatattcttgcagattcagtgacttcgcagcctctctagggagactgggagtcaggctcctgtttgtgtttcctttacgaaaggcgctttctcttgttcttcctgtttacttctgaagagttactcaaagtgtttgctgggcctttttcacagcaacagctcagtgtagtggctgagagagcagagtccccacagtgcagtcagagatcccattcagtttacttaacctttgaatgttccatgcctaaccacgtgctgtgcttagtcagtgtctgcttgaggtgctgctggaaaggtcacctctgtggtttctggccttgtttcacaccaagccctcagtagaagttggcaatttcatgaaacaacacctctgagtcttttgccgctttcctctgctcagctgccagccgaggctccggtgtagccattttctgaggtggtggttactatgcagttccattttggcagttctaatttttgcctcttttaaagagaaagccgttctgtctcacagcaccggtgaggttgtaccatctggtctctgctgctgattcaggttgttgactcccacagctccagtttccatttctctctgcaaatgagtcctgcacaccttgcccttccagtagccgggaggaaacagccactcagctgaggcactgatgtgaccctcaagcctgagtttctgctgccctctgacagcagtctgtaacctactccagagccctagtgggaatgtgagtgaggcttcttttgaaacaccctgtccaggctccctgggccctgagcagatagaacctgtggtcttcttctctcacatagaggacaggtctgtaattctgtttttcttcctagatgctcctgtggcctgctcaattgcaaacagtaagaccagcaatgccctagaaaaggatctagatcttttggcctctgttccgtccccttcttcagtttccagaaaggtgagtcttctgcgtgtctcaggatgaaagagcattccagaaaaattgatagcttaatcatggaaccaggtcatgcttccttggtagggctgaactctcatttctcttgattttctctttggtgttgttatcttcttctagcccaagattactgcttcataccattttgtcttttgccctcaaagagtgactatttgaataggcctgtgtcacagggtgacatattataaaggctgatacttgaggtgaactgcttggtctgaagccctaccaaattgttgtgggtatgaaagacttgaatatcacttgcttttatttgtgggatgtcccagaaatagtgtctgtgtcattttgtatattttgttcatactttcatatttccataagcattctcccaaatggatattttgtaaatgaggaacacttagctatggaagttgtttctggctgtactatgataaatagctactctgagatctttgtatgtatgagacagacaggcaggcagacagacagacagacactgggagttatataaccgggaccatatttatcttaggcaaatactttgctggtgagctatctccagtctgtacactgactaaactcagttttctgtgctgcatcattttggggttatttttatttttttcttatcaagtcacattgtttcattgttttgttagagaacaaaggcttgtaccagagcttaattctcaaggcttatcagctatttttcagaagatgctgacttaacataagccataaattcttttctttctttctctactcccctatccatcggtgtttcacactttaccagttttgtccaggctgacctagaactcacttgtatagcccagatagctcagcctctcagctggcctcttgcctcagcctcctaggttctgagctaccacacctggcttgtgagccatgaattcttatcagaagtattaaaagcagcagaaagtgtaagggttcttccacagaggaccggtctgattgtcctgctgccctttgtgagctaggctgtaggttccatgctgactgactttctcactgtcctctgcactaggctgtaggttccatgccaactgcagggagtgctggttctgtccctgaaaacctgaacctatttccagagccagggagcaaatcagaagaaacaggcaagaaacagctctccaaggactccatcctatcactgtatggatcccagacgcctcaaatgcctgcccaaggtagagtctataaggtctcagatgtgctccggggaaagactgagaacaaacatgcaagaattatttattgtgttggaattttactcagccatacagaaaaatgaaatttgaaaacaatggatagaagtggaaaatattttgttgaatgagataacccaggctaagaaatatacataccacgtatataattttactctcacataagtaagcttgtgcaaaaaattatgtgttagaatccacatataagagtacttgtggctagagcccagtaaaatagaaaggggcccaggagagggggaaagaggctttaagagaaaaagatgggaaggctgttagcacgtgtaatatggaaggaggagtaatggaggcacagagtaaagcagggatccaggggtccagggagatccaggggtctggggataggagtgtatgggttggcgggaatcatccaaaagtaagtgtgtatgaaaaatgccataaagaaacatgttccattgtatactaatttataaaaggaattgttttgttatgacaaggactagttaactctgaggtcagcgacattacatataaaacaaacttgaatatggctttgcagaggaggcttcagagtgagtatctgcagatagatataatgtcaccagagctatacttctatagggtctagtgtcactcttctgtgaagtctgactcaaagtcagggtctgcctccgaaagggaatgactagatcagagtgtggcctgatgagaaccatagaaaggcttgtacaggattcatcctgctgctttctgtggagaccatcttcctggaaaggaacggccggtgagtatgtgggccgactgtgtcttctcctctgacagacccatatgtgtgttttcttggcagcaatgttcatggctcctgctcagatggcataccccacagcttaccccagtttccccggggttacaccacctaacagcatcatggggggcatggtgcctccgccagtaggcatggtagctcaaccgggagcctctggaatgctaacccctatggccatgcctgcaggctatatggggggcatgcaggcgtccatgatgggtgtgccgaacgggatgatgaccactcagcaggccggctacatggcaagcatggcagctatgccgcagactgtgtatggagttcagccagctcagcaactgcaatggaaccttactcaggtaagcagcctcactgtgcctgggacaagacttcagagccttcctcagtgtctgacctggtgccactcctggatcccccaaatcttccttatatagacaagctaatgccaaagatataccttgtttttatttccctggaaggcctggcagaagttagagattcctgagtttctgtaggaactaagtctgagtctctccacaacttctccaaaacgaaatcaaacctctacagacaagcaaggagtacaaataaaaccactgttgcgggcttcagtgacgtgatacttggcacaagagcatcctatctcactgagccagcacctcaaaggaaactgtgcaaaaagaagagagggagtaaaggcctagaggtgactgagccaggaagagaaagtcccatcctggtgtaggcctacgtggggcagactgaaggcatggagagtaaacctctcattaactgggctttgcagttaacaagagacacacaggtgtctaggttggttacttgggaaggcattgtgtagcgggaggccagcaggaggtaggaggaggaaagtcttactgctttcttttctttttttttttttttctttttcaagacagggtttctctgtgtagccctagctgtccaggctggcctcaaagtcacagagatctgtctgcctctgcctctgcctccccagtggtgggattcaagacatgctctatccccgcccaacaggaagatccatcttatatatttggagaaactgatgcacagcagtcaactttgtttgtttgtttgtttgtttgtctgtttctctctctctctctctctctctctctctctctctctctctctctctgtgtctaagattttacttattttacgtatatgagtacactgtagccgtcttcagacataccagaagagggcatcggatcccattacagatggttgtgagccaccatgtgattgcagggatttgaactcaggatctctggaagaggagtcagggctcttaaccgttgagccatctgtccagcccagcagtcaactttcaaatatcaggaagcttttatgacttaaagaacaagaaaattccatgaactgaggccacctctgtacatgtctccctacacaagtctatcagccatacattaaacaaggagtcaacacccaggctgacaataggctttagatcagaggaaagggctgaaacagtgacgtgtggactgttgtggcaccgtgacattccttgggtgtgctacagagtgattctgggagcgcgttcatcctcatgaggtgcctcctgacctccaagaggtgaatggtacgatgcctgcagcttgtggtttccctcaaaattattttaaaggttttgtatacatatacatgtatggatgattcacacacacacacacacacacggaaaatttttaacagctagtaaatttaaagatgaaacgtggatttttgttatattatttttccagtttttacctaattttcaattttaaggaaaactgaaaattttttgaaaagtttatggaaaaagaagagtttatttatacagcaaacatactggactcaggggacttataattatttatctaacagattgtcagtttgtgtttcaatctaattacaaggaagtccctactggccagcatagtagcacaagtccctaatcctagtggactcatgtgccactcctagtgccacttatgtggcagaggctagataatcactgcaagtctgagcccagcctgatatacaaggtgagttcctggctagtcagtaatacacagtgagaccctgtcttaaccaaacagcaaaaaggagactctgtcccacccatctgcactctcctggttggagatggaagacttgcaggttgtttcccattcttcctttgtttattcagtaggaagccccatcaccccacattcccaagcaagcatgcctaagcactgacactggcagtgatgccctctgctggtgatgaggtggagcactagcaggagtctgtctctggactctgcagggcaagctgtggccagctgacaatagtcccttcagtgaggatatgaggagagtcctggaaaagaagagacgttcactggaggcatttctgctgaccagactcaggagtccttcttacctcccacaacagaaggacccttcccctgctctgtgcagtgcccatggcctgatctgaaaaatctctgtccttttcagatgacccagcaaatggctgggatgaacttctacggagccaacggcatgatgaactatggacagtcaatgggcggtggaaatggccaggcagccaatcagactctcagtcctcagatgtggaaataaaagcaaagcacctgtatggctgccactctttttgacccttgctttcctccctcctctttttcccccagccttcccctttcctttttcctacctctctctgtttggtttagaaactgatcataagtcatatgttgtttggcattctgcctaacccagtctcccttcccagagtcatggacctctctgttgctttatgttggtcatgtccctgactgtccagatttcctcccaccccaccccaccctctcccagcaccagcaccttagaaactattggcagaagagggcacatgagctgcgggagagtgtatacactgatcagtacctcccttgaggctgagcttcctcgcagacccacagaaaggtctataaaggacaagtgcttggcagaggggaaagtagaaagggtctttattggctataagctgtttctaagtgctgagagttttgcttgaagagggagcgagccatcaagttcccagcttttcaggaatgaaagaagttcagcagtcagataatccttgtgtcttgggtcagtttggccctggccctagagtgaggcaagcccttcctatgaagatgagcaaaaatattattccacttcactctgagtgctttcaggatctggggcttcaagactcactgcttcagtcagccttcattagcaccaaagactccatgaaggtcgtcccccacacaaacataccccttgcgcaccttctgcctactttgagccggatctggcctgtgactagaagaccaacccctacgaggaaatgtggagctcaacgtgtgcactgcttgtatgcgtgtggatgtgtggatcccacctgccgcctccccatctgctctgggtgtatttttgttttttatagttctaggtttacaacagagaggagttaatttatcaacagcctaaaactgttgccaggtcatcttacagtttaaaacatgccatctcatcggtagtccctgctcttttccctctcccatctgccagtctctctgtgccctcgtgtctgagtgctgtttgcccaccttttccaggtgtaagaggcagagagcctggacagctttctctctcagccattgttcaccccacttgaaaattcaaacaagaaaactttgcttcaaagatctcatgtgtgggaaccacagcgcctggttgcctttctcctgtgtatgtgtaaattccttaataaatattgcagggaaagaccctttttgctcggctgtcactgtgttactcttggaagacagtgagacatacacaggatttctgctttccaagagcagctgctgccttcacctttgcatcttaaagaattctgtttttagtaccaagggcaggccagtccagaacacagaaagacctttcttcagtgacagtgggagccatgagctgaggggcctggagctctgcactgtaagggtcatagaacattaggatctggagtgctttccctatagatggaaaagctgagacccagagaaagaacacagttaccaagcatacacccttccttggcagagacaatagtagactccaagactgatctgagagcactttgtgctttccctgtacccagagcaaatagtttaaactcctcactaacaaggtcacagtagctccctttgattaagggttgcccagccctccctaagcagtgaaccctaggaagaggtggacttctccatcaggaagcagggatggtgctctgcttggctgggtggggagggtaaatgccaaggacaaggtctgcagtgcattccttcctccagttgactcccctcctgctctcccagagggtactgtgctcccttgctgctctcacagagtaccatgcttcctcccttccccatcgtccaccttcactgtcctttcattagagcacgaggctgagtatacggtgtaaatggaaggatagtacagtagccactcacagcaaggccactggtacccgtatccttgttaactgggattccaacaaattatgatccctagaggtctcagtataaaacagaaccaattgtagtcttaagacaaagtaattcctgtggcacatttaacacaatatagggcaattagcaagcattcaagtgtcagtaagaattatgtgccagactgtgttagacattatttcatccagcacatatttaatgttgtaaacatcatcccagaaactgtctgaggcggcagagacagcacagtaagtaactactttagtggtgtgggctaatttggtaggaaagagggacaattaacaaatgaatttcagagagtattaaggtaagatagtgggcatggggatctgggggaagtatatcagaggcggttatattttaacaggcctgaagaagcagccagtgtagcagagatgtgaaaaatatagagtaaagcaattgtaattgtgtactggaaatgagctggctggagtcatgaggttgggaggtgtcagtatggatgagttcatcctgggatggcatcaagagaggagagctgagtcttgggacccactagattttaggacttggtggtggtggggtgatattggccctgaccttaagctttgaataacacatttataattgctgatacaatagatatgagctggcatcagggtgccgtcaggaattcctccaaagaatactggcatccgagctgagtcttagagaggtggcagttagcctgtagtagaggaaaggggaggaatttcccagatagcactgtgtaaacagatcatttgaagaagtgaaagcaagtggagagtcctaaggtataagtgggtctatggtgtgaaatgagacagctggggttggccaggtcacaggagagctccccagatcccaggaaggagtttaccctaaagtgtgaacaatagatttcatgttcctacttgagttctagataacttgctcttgtaccactgtaaataacatgtctaaggaagcaagacgaaagccacagggccagaaagacagtcctggaataggactagggaagaatgggctgattctagttagcagttttatgcctgatgagtcacttgagatgctattcggtgtcccttagaaatcctaaaataagcttgggaaagattgcattctagatacacctcatgtgtatctagaatctaatagcaacagagtagctccagaaagtcctgtagaagaaattttccatggctttctagcacttaacagcctaactttacagaagaatccatcttttaaaaatatataatatccatggaataccatttgggaaactcaactagaaaaattcgccaggagataaagctgggaggtcagcaatgtctagggtgggatggagggagagagagaaatgaaagaaatctgagtctagggcatgccaaagagcctcatggaaggagtggattggatcggaaacggtgtaatggtaaaatgaaaagtatgagctacgaaaggaactttgagggaataattcattctgagtaggttgaagaagagatacccaagaaggagagcagattgagtggagatgacgatgcatagtcagcattcttaaggacaagctattgagatggagagatcacaagtgtcaagtcaggagggaagcttaggggacaggatgagaagggacaatcagactcagcatttgacagcgtgcaccgcgtgttcatgggatggcagggctggaaacctaccagtgtgggctgaggactacactgaaagaggtttaaaagtagagaaacaggctatgttatgctatatgtacatagtgaatttctagtgttgttataagaaatagagcgtatgtttcaaaccaatgaagaaaaaagccaataacaactgtctgcctcactctcaggaacaaacaaggtaagaatatattttttctttctttctttctttctttctttctttctttctttctttctctctctctctctctctctcctctctctctctttcttttctttcccttccttccttccttcctttccttccttccttccttccttccttccctnnnnnnnnnnnnnnnnnnnnnnnnnnnnnnnnnnnnnnnnnnnnnnnnnnnnnnnnnnnnnnnnnnnnnnnnnnnnnnnnnnnnnnnnnnnnnnnnnnnnnnnnnnnnnnnnnnnnnnnnnnnnnnnnnnnnnnnnnnnnnnnnnnnnnnnnnnnnnnnnnnnnnnnnnnnnnnnnnnccctccctcctctctctctctctctctctctttctttctttctttctttctttgcccagacaggctgtcctggaactcactttgtagaccaggctggcctcgatctcagaaatctgcctgcctctgcctcccgagtgctggattaaaggcgtgcgccaccaccgcccaactcgtaagaatatattttgatttgcttttttagttatgactttaaattttcatgaagaagcagaaggaccctgttgtccttaacatgaagaagctgaacctcaacagtggttgctgctaagtttccaggtttctcagccttgctggcaacttagctaggggtgtgccgtgctccttcctccaggcggctaaggagtggtttctctcagtaaataaacaatgaggaaatgtatatctatatatatttatatctgtgtaaatacacatctgtatgtatgtgtgcatgcatgcatgcatgcaggtatgaatggcttgtcacaacataataaaagatgctccaaacatgtgataaaggcactgtatatatgaaaaaaaatcattccaaataggaaaaagacaagcaaatcttgtggttgtaggcctgtaatcgcagcctctccagagacagaggctggggaattttgtcgtcagcagagtgagttcaagcccagagtgttggggatatagcttagtgcttacttagcagacacgaggtcctgggttccatcccagcaccccagtaccagaagtgaggagagaaagatatacacacatacacgctcacgcacgtgcacccctactcttgtggacactttaagggataaccaaatttactagcatatccatatgaagaaatgcctagccttactaaaagttggggaattaaaaaggaaagccacagcaaggtatctctaagtgaggcacaagcctccactccctggagaaaggcaggaaaatatctgtaatttcaaggccagccctgctcacgtagttccacaggagcctgtctctgtctctctcagtctctgtctttcttatgtgtgtgtgtgtgtttatgtgtgtatggtgggtgtgttccagaataactaaaaaacaaaacagaacaaaacaattccaagtgttagaatgtgaagcaactatagtagatggggatgtaaactgacccaagttcttgggagaatgttttagtgttagctgttcagattactaataggtaacaaatctgccccttggtgtataccaaatagaaatgcctgtgtttgaacattagaagcataaaaatgttcaagaaagcattattcataatctcccaagctagaaacaatctaaaagtccattaacagaaaaatgggtaactaaatcatggtatattcatgcaatagattagtggcgagaatggaaattatttattgcagcacagttacatgtaattaaatgcagggagctcacaaaatgctaagtgcattttttactgtgtcatctgaaagagtgttacactcctagatatttgagtatttgcctcctaagtatgatatcgtgtgcaatttaacagtaatttcatgccacctaaggtcagtgttgcttcgagttattccaggaatatctcatctcgtttttgagagcagaccttgctgagaagcccagactggccttgatcttgaaatcctcctgcttcagcttcccgagtactctgattacaagggtgtgccagcacagcacacagctacttttccttttaaaccatgacccagccctaaatttatgcactgaattttgttatcatacctgtttggtttctttgtgtgtgtgtgtgtgtgtgtgtgtgtgtgtgtgtgtgtgtgtgtgtctaacttttcagaacattgactgaagagttcagccaatttttggtaggaatttttctttcattcttccttcctccctcccttccttccttcctttcaatttcagaaacttgaaattgggctagtgagatgattcagtgagttaaggcaattgctgccaagactgacaaccgagttcaaaccacagacccacatggtggaaggagagaatctactacaagttgtcctctgatctccatattcatgctcctggcctgtgtgcaccaacacacaaacacatgagcacactgacacacacaaaacaaagtctttttaaagggaaaaaagaaacaagaagttaagtcttgagatttgaaggaggcttgtttcgccattaggaaaatggtaagcttacatatagtactgagactacttactatatagtctacaagaggagaaacatatctacagtctggtgatatctattcacatggacacaactactgcagatttgtggcttaaggtactaaacctagtagctgggcctattttaaaaaagaaattgtacttattttgttgtatgggtagattgtctgcatgtatgtctgtggatcatatgtggtgccatggaggccaaaggggggcattggatctcctggaactggagttaaaaacagtagttaaagggataagataggtgctgggaatccagtctgggtcctgtggaagaccaggaatctctccaagccccagccaggcattttaaaaagtactatagtatctaattacagcatctctgcgttcccttccatccctccagatgggcatatttttaatatacaaatctcaacatgtattggctcaatctgaaactaggatgacagacatgctctttatatacaggaataggtatcaaaaacatgggatcaattactaaacatatcatttctttctgtcaccctgccactggtaggagcccaaagacattttgtttactaaagtcttgaataccacttagttttaatagtgctagcaaggccttagccctgggtttgatctagctactagcactttagggcaaagaatgacatgaccaaaagttcatcttcctgacaggcatggtagtaaaggcctgtaaccccagcagggagactgggagtttgaggacaacttaggctgcatagtaaaatggtttcaaagaaagaaaacagaaaaggaagaaggagagctcagttattagagtgcttgcctagcaggcctgaaaccctgggttcaatccccagcactgcataaactgggctatgtatacacctgcaatcccagaactcaagggatggggcaggagaatctgaagctcagtttattgttggctatatagtgtgcgaggctattctaggctgtgtgagatcatgtccaaaaatcaggtgctagcacctttaaacatcagttagtagccattccctatagaccaagaatgctgatgaagtgtggagaggtggctcagtgcttaagagcacttgctgctcttgtagaggacccaggttcaattccccgcacccacgacatggtgacttacagcttctgtaactctggttccagaagattcagcccctcttctgacttctgcatgtatgtggtacacaggcatacatgcatacacattaaattaaaactatgctgaataaaatttatttcctattttcagtggggttgtataattctcaatagatgcctttaacaatgattcatccacctgaaacccagtggtcaagatggattccaagatctttggaggtggataattgagattagggtgcaaaataaatggcagattactaaagtcctacttcatgtagctaaagtttccccagctttagagacagatattactgagatagaaatgaagccttgcatcctgctgctggacctgagctagaggacagattctgagcctactcagcagaggctgccatcctgaagagtcccattgccattttacccagtaactatacgaggtggatactagcagttagctattgccaaggcctgggtgtatataatgtccttgtccagttatcagatgagatagtatggagctgaggcttgctgtaagaaacctcacccaacagaacctttggcctttctgtcggtggatcctcaagttcctgagtggtgtctagtcagcatccttacatctcttccctcgggcagactggattcactggagaagacttttcaggtatatgtagagagtattgaccagatggaacattctggaaagaaggctaggagtctcaagttcttgatatatgttttcaaaggtccttacccattccagtgtccctattcagcacagagctggtcctcttctatgccccagtgcccattagttctaagtctcctctgagatgacttctccgggctcctggagagagatacaaagaggactgctgtctgactacagagctcagggatgctgggaatcagcactgcctccacagatgtctcactttgactcccgatcaatgtaccccaggcaatctctattggggaattgtaacattcatttttgtcaaattttctatttaatgatggttcttaaacagctccctttttagccctcaacccagcagaggtagtggaaaaagaaaggatacgggggaagtagacctgcttaggagtggttctttgaggcaactcccatctgtgctgtctgaaaattggcagttcagttcacaggtcagtattggcagctcgattcactttacagatataagtcaggatagcaaacataaatcagcagcagtggtgctacctagcaggatagccaggccttagcctccacaccagtcagcagcaggagggaccgggaggaaggccaggagttctctgtgtatctctcaggaaagaaaagatcagtgaagactggagaccaacaagagttgcacagctatctctataaacaaacctagctcagcacacccccaacccactccgggtcattgtcgatattcctccaaatatcacgtgtcctccacggggtcttgcctcagcacgtgcatgtgtctcagctgacatcactctgccaatcagccgagtctgcagaagcagcaagaaactgcagcacaccaccagtcctgtttggtgtgtttttctcatggagtcctgacaaatgcaactacaactacacagtgtgaggcagaccaagcaaagagttctttatcacgtgtcctttcatgtgcttgctttagcagaacatcctttctcctgtgtctgcttcagctaaacatcccttcacgtgtctgccccagcaaaacaccattcaaacgactttccaaagagcccttaagtttctacttcatggaatcctgcagggacagacagggtccttctggctcgtcttgatgcttgcttaggacttgcaccttttcagaactctgtttagcacccatctctatcatccagtttccaaaatgttaacttttctcccttcccattcaacttgtcctgtggatttataagaccctgtccagagagaacagggagggataatcctctgtgtgtccttgtgtactggtacattgttccttggaggagaaaaagctcccataaaaactgggtttttcaagtggggtgggaagatgatctataagatgaatagaaactaggcatgcctgaaatctcagcacttaaaaattgagggtttgctgttagtttgaggtcagtatgggatggtaagctcttgtctcaaaaagaagtaagaactgatcaaattcactggaggcagaagctcagagtagagtatttgtgactctgaaggaagatttttaaccacaatgaacttaactttttaaatgttaactgaaattaaacggggctgagtcccatgtctaggaaaatacacgttgctacatgggcagcttggtggactgtctttccaagacgtgttgcagaaactgtaacacgtacactaattccgagatgtcaaggacactagtgtttggtggagggtagtgaggctggttagacacgatagctcatttcacaggagagcctggcttccaggcacgttgttcacacattcggggactaatctgggtcatctcaaaagcagaccctgagacaaagaagggcatataagtcatgtatttgtgaaactcaggaaacagcagtgggaagcagaggaaacaagacaaggaaaggcagacagtgagtaaagtgtgggttattcttaggttgtttgtgggtgccgtgcatgcaagtgtggtaagtgtgtgtgtgtgtgtgtgtgtgtgtgtgtgtgagagagagagagagagagagagagatcaagccagatgctttcatccctcctttcttttttcttcctttctttgaaaccttcttactatgtagcccaggctgtccttaaactcccagtctccttgctggtgttacaggctttgctaccatgcctggcaggaagatgaacttttggtcacatcattctttgccctctggtactggtggctagttgtccaaaagccaaggccttgctaagaagggactctacactccacccacaacttcaccacaaggcttccctttttcctttcctttctttccaatttaaaaaaaaaaaaatcttaatgaattaccaattttactttttatttaaaaaaatttttttgtgtgcctggggatttttgcttgcatgttttgtctgctaaaccactgggaaagctctttagcccctgaattgcaaaattttaaatggatcacttatcttaaaagtgggaccattttaactttattatttttagggtttttaaaagtatactttttaacatcaaaaaatttaaaaaacattttaacacaatagaaatccttaatatagacatctaaattttcttttctttattatgtcaaaacaatatgcagttaagaaatagggagaagaaacgggggttgcacacctttaatcccagcactgaggatgcacaagcagtcagtctctgagttccaggccagccagggctacacagagaaaccctgtctccctccaagagagagagagaaagagagaaatagggataggagacagagggagagtgtgaagtgcatacaggggccattattacattattacacaggacgcagtcagagtgctaacttgtacctcaaaacatctgtggaaaacagtttcgttcaccagcagataaccccttccaaaccgagg

SEQ ID NO: 909 - DNA, 2554 bp, Mus musculus
  misc_feature (1)...(2554): n = A,T,C or G
ncaggggttcttggggggtgcagggggcgcgtcgccctctgcccccgccggcaccctggccatgacaggcaagtcggtgaaggacgtggatcggtaccaggcggtcctggccaacctgctgctggaggaagataacaagttctgtgctgactgccagtccaaagaaaggaaaggggagagcattggcatgggggacaaattgatcttttacattcctagtgatggagacacggtttttgattcatccttaataagtgtttgtagagctgttgaaggatttattcgagataaatatgagaagaagaaatatatggaccgaagtctggacatcaatgtccttaggaaagagaaggatgataagtggaaacgagggaatgaacccgctccggagaaaaagatggaacctgttgtttttgagaaagtaaaaatgttccgttcatgcactcatgcttcctggcacttcctgagccttgtttctttggtaactgtctttgacaaacagccataccacaagaatacctgtggcttcacagtgatggggaaaaaagaagacgcacagctacctcggaaaagctctccgaaatccgcagcccctgtcatggacttgttgggccttgatgctcctgtggcctgctcaattgcaaacagtaagaccagcaatgccctagaaaaggatctagatcttttggcctctgttccgtccccttcttcagtttccagaaaggctgtaggttccatgccaactgcagggagtgctggttctgtccctgaaaacctgaacctatttccagagccagggagcaaatcagaagaaacaggcaagaaacagctctccaaggactccatcctatcactgtatggatcccagacgcctcaaatgcctgcccaagcaatgttcatggctcctgctcagatggcataccccacagcttaccccagtttccccggggttacaccacctaacagcatcatggggggcatggtgcctccgccagtaggcatggtagctcaaccgggagcctctggaatgctaacccctatggccatgcctgcaggctatatggggggcatgcaggcgtccatgatgggtgtgccgaacgggatgatgaccactcagcaggccggctacatggcaagcatggcagctatgccgcagactgtgtatggagttcagccagctcagcaactgcaatggaaccttactcagatgacccagcaaatggctgggatgaacttctacggagccaacggcatgatgaactatggacagtcaatgggcggtggaaatggccaggcagccaatcagactctcagtcctcagatgtggaaataaaagcaaagcacctgtatggctgccactctttttgacccttgctttcctccctcctctttttcccccagccttcccctttcctttttcctacctctctctgtttggtttagaaactgatcataagtcatatgttgtttggcattctgcctaacccagtctcccttcccagagtcatggacctctctgttgctttatgttggtcatgtccctgactgtccagatttcctcccaccccaccccaccctctcccagcaccagcaccttagaaactattggcagaagagggcacatgagctgcgggagagtgtatacactgatcagtacctcccttgaggctgagcttcctcgcagacccacagaaaggtctataaaggacaagtgcttggcagaggggaaagtagaaagggtctttattggctataagctgtttctaagtgctgagagttttgcttgaagagggagcgagccatcaagttcccagcttttcaggaatgaaagaagttcagcagtcagataatccttgtgtcttgggtcagtttggccctggccctagagtgaggcaagcccttcctatgaagatgagcaaaaatattattccacttcactctgagtgctttcaggatctggggcttcaagactcactgcttcagtcagccttcattagcaccaaagactccatgaaggtcgtcccccacacaaacataccccttgcgcaccttctgcctactttgagccggatctggcctgtgactagaagaccaacccctacgaggaaatgtggagctcaacgtgtgcactgcttgtatgcgtgtggatgtgtggatcccacctgccgcctccccatctgctctgggtgtatttttgttttttatagttctaggtttacaacagagaggagttaatttatcaacagcctaaaactgttgccaggtcatcttacagtttaaaacatgccatctcatcggtagtccctgctcttttccctctcccatctgccagtctctctgtgccctcgtgtctgagtgctgtttgcccaccttttccaggtgtaagaggcagagagcctggacagctttctctctcagccattgttcaccccacttgaaaattcaaacaagaaaactttgcttcaaagatctcatgtgtgggaaccacagcgcctggttgcctttctcctgtgtatgtgtaaattccttaataaatattgcagggaaagaccct

SEQ ID NO: 910 - protein, 441 aa, Mus musculus
QGFLGGAGGDSAPAGTLAMTGKSVKDVDRYQAVLANLLLEEDNKFCADCQSKERKGESIGMGDKLIFYIPSDGDTVFDSSLISVCRAVEGFIRDKYEKKKYMDRSLDINVLRKEKDDKWKRGNEPAPEKKMEPVVFEKVKMFRSCTHASWHFLSLVSLVTVFDKQPYHKNTCGFTVMGKKEDAQLPRKSSPKSAAPVMDLLGLDAPVACSIANSKTSNALEKDLDLLASVPSPSSVSRKAVGSMPTAGSAGSVPENLNLFPEPGSKSEETGKKQLSKDSILSLYGSQTPQMPAQAMFMAPAQMAYPTAYPSFPGVTPPNSIMGGMVPPPVGMVAQPGASGMLTPMAMPAGYMGGMQASMMGVPNGMMTTQQAGYMASMAAMPQTVYGVQPAQQLQWNLTQMTQQMAGMNFYGANGMMNYGQSMGGGNGQAANQTLSPQMWK

SEQ ID NO: 911 - DNA, 69648 bp, Homo sapiens
acaaaagacagtcttgaattgctgatgccactaaccccttccccaccagcagccgtgtggatcagagagagaactggtgtgcttgggggaaggagagtgcagtgattgtgggactttacattagaactcagtgctgccttgtcacagtggaaagcaaccctgggcagaactcagctggtgcccccagaggcagcatttagaccagctgtagccagaggggaatcacgaagctcactaagcttagtctcaccaagctcatttgcatgtgacaaataacactgagctcatagtaaaacagggagcataattatccagctttctaaatgaacaggtcattctatgagtgttatctggtataggtaaagtgactggccagtgaatcagaaactgattaacatatggcttaagagattttgatctcttagctataagatacactaatgagagtttcctgtggcaatagtccaaaaatgttcaccatacctctttcttggtagtaatctgggcattttattactgtggcttctctagtatagtggtttttattttgtccttatttatgtgagttggggtttcaaaatactctgatttaaagaaaaaaaagagggcaagcaaggtggctcacacctgtaatcccagcactttgagaggctgagtggggaggattgtttgaggccaggagtttgagacagcctgggcaacatagccagatcctatttctgcaaacagaaaataatttattaaagaaaaataagatgggccaggcacagtgattcatgcctgtaatcccagcactttgggaggccaaggcaggaggatcgcttgattccaggagctcaggaccaacctgggcaacatggtgaaaccctgtctctacaaaaaatacacaaaattagctggacatggtgatgtacgcctgtagtcccagctactcaggaggctgaggtgggaggactgcttgagcctgggaagtcgaggttgcagtgagctatgttcgagcctctgcactccagcctggatgacaaagtgagaccctgtctccaaaaaaaaaaaaaaatggctcaaggctgtggatatcctccacagggacatcaaggtgctgaaaagctcaataagaataataatcggtcaaacagctgtcaaaaagtataatgtctttttagcctcagagtctctgatcaagcagatcccatgaatccttggcccaggcctaaataaggtgggtaagttccctcccctgctgacacacaacgaaaacatggtggccaaagtggatgaggtgaagtccacaacccagtttcagatgaagaaggtgctatgtctggctgtggctgttggccatgtgaagatgacagacgatgagcttgtacataacattcacctggctgtcaacttcctagtgtcattactcaagaaaaattgccaagacattcaagctttatatactgagagcaccgtgggcaagcccacgtgcctgtattaagccacattctaggctcatgcctgtaacctcagcactttgggaggccaaggtgtgaggatcattttaggctatgaattcaagaccatcctgagcaacaaagcaagactccatctctatttcaaataatttttaaaaggcacattctaataaattctactgccaccaaagcaaaacaaaacaaaataaaaacaataaagagaaattatctggaagctgagtatgaaatgtggtatcaggattcttcaattcattccaattttctgaaatccattagatacagtgcaaccaaactatgctcagtggccactgggacagatagaaaattctataactggatacattcggggaggagccaagatggccgaataggaacagctccggtctacagctcccagcgtgaccgacgcagaagaccggtgatttctgcatttccatctgagacctgcagctgagggtcctgtctgttagaaggaaaactaacaaacagaaaggacatccacaccaaaaacccatctgtacatcaccatcatcacagaccaaaagtagataaaaccacaaagatggggaaaaaacagaacagaaaaactggaagctccaaaaatcagagtgcctctcctcctccaaaggaacgcagctcctcaccagcaacagaacaaagctggatggagaatgactttgacgagctgagagaagaaggcttcagacgatcaaattactctgagctacgggaggacattcaaaccaaaggcaaagaagttgaaaactttgaaaaaaatttagaagaatgtataactagaataaccaatacagagaagtgcttaaaggagctgatggagctgaaaaccaaggctcgagaactacgtgaagaatgcagaagcctcaggagccgatgcgatcaactggaagaaagggtgtcagcaatggaagatgaaatgaatgaaatgaagcgagaagggaagtttagagaaagaagagtaaaaagaaatgagcaaagcctccaagaaatatgggactatgtgaaaagaccaaatctacatctgattggtgtacctgaaagtgatggggagaatggaaccaagttggaaaacactctgcaggatattatccaggagaacttccccaatttagcaaggcaggccaacgttcagattcaggaaatacagagaacgccacaaagatactcctcgagaagagcaactccaagacacataattgtcagattcaccaaagttgaaatgaaggaaaaaatgttaagggcagccagagagaaaggtcgggttaccctcaaagggaagcccatcagactaacagcggatctctcagcagaaaccctacaagccagaagagagtgggggccaatattcaacattcttaaagaaaagaattttcaacccagaatttcatatccagccaagctaagcttcataagtgaaggagaaataaaatactttacagacaagcaaatgctgagagattttgtcaccaccagacctgccctaaaagagctcctgaaggaagcgctaaacatggaaaggaacaacccgtaccagccactgcaaaatcatgccaaaatgtaaagaccatcgagactaggaagaaactgcatcaactaacgagcaaaatcaccagctaacatcataatgacaggatcaaattcacacataacaatattaactttaaatgtaaatggactaaatgctccaattaaaagacacagactggcaaattggataaagagtcaagacccatcagtgtgctgtattcaggaaacccatctcacgtgcagagacacacataggctcaaaataaaaggatggaggaagatctaccaagcaaatggaaaacaaaaaaaggcaggggttgcaatcctagtctctgataaaacagactttaaaccaacaaagatcaaaagagacaaagaaggccattacataatggtaaagggatcaattcaacaagaagagctaactatcctaaatatatatgcacccaatacaggagcacccagattcataaagcaagtcctgagtgacctacaaagagacttagactcccacacaataataatgggagactttaacaccccactgtcaacattagacagatcaacgagacagaaagtcaacaaggatacccaggaattgaactcagctctgcaccaagcggacctaatagacatctacagaactctccaccccaaatcaacagaatatacatttttttcagcaccacaccacacctattccaaaattgaccacatacttggaagtaaagctctcctcagcaaatgtaaaagaacagaaattataacaaactatctctcagaccacagtgcaatcaaactagaactcaggattaagaatctcactcaaagccgctcaactacatggaaactgaacaacctgctcctgaatgactactgggtacataacgaaatgaaggcagaaataaagatgttctttgaaaccaacgagaacaaagacacaacataccagaatctctgggatgcattcaaagcagtgtgtagagggaaatttttagcactaaatgcccacaagagaaagcaggaaagatccaaaattgacaccctaacatcacaattaaaagaactagaaagcaagagcaaacacattcaaaagctagcagaaggcaagaaataactaaaatcagagcagaactgaagaaaatagagacacaaaaaacccttcaaaaaatcagtgaatccaggagctggttttttgaaaggatcaacaaaattgatagaccgctagcaagactaataaagaaaaaaagagagaagaatcaaatagacacaataaaaaatgataaaggggatagcaccaccgatcccacagaaatacaaactaccatcagagaatactacaaacacctctacgcaaataaactagaaaatctagaagaaatggataaattcctcgacacatacactctcccaagactaaaccaggaagaagttgaatctcttaatagaccaataacaggagctgaaattgtggcaataatcaatagcttaccaaccaaaaagagtccaggactagatggattcacagccgaattctaccagaggtacaaggaggaactggtaccattccttctgaaactattccaatcaatagaaaaagagggaatcctccctaactcattttatgaggccagcatcattctgataccaaagccgggcagagacacaacaaaaaaagagaattttagaccaatatccttgatgaacattgatgcaaaaatcctcaataaaatactggcaaaccgaatccagcagcacatcaaaaagcttatccaccatgatcaagtgggcttcatccctgggatgcaaggctggttcaatatacgcaaatcaataaatgtaatccagcatataaacagaaccaaagacaaaaaccacatgattatctcaatagatgcagaaaaagcctttgacaaaattcaacaacccttcatgctaaaaactctcaataaattaggtattgatgggacgtatttcaaaataataagagctatctatgacaaacccatagccaatatcatactgaatgggcaaaaactggaagcattccctttgaaaactggcacaagacagggatgccctctctcaccactcctattcaacatagtgttggaagttctggccagggcaattaggcaggagaaggaaataaagggtattcaattaggaaaagaggaagtcaaattgtccctgtttgcagatgacatgattgtatatctagaaaaccccattgtctcagcccaaaatctccttaagctgataagcaacttcagcaaagtctcaggatacaaaatcaatgtacaaaaatcacaagcattcttatacaccaacaacagacaaacagagagccaaatcatgagtgaactcccattcacaattgcttcaaagagaataaaatacctaggaatccaacttacaagggatgtgaaggacctcttcaaggagaactacaaaccactgctcaaggaaataaaagaggatacaaacaaatggaagaacattccatgctcatgggtaggaagaatcaatattgtgaaaatggccatactgcccaaggtaatttacagattcaatgccatccccatcaagctaccaatgactttcttcacagaattggaaaaaactactttaaagttcatatggaaccaaaaaagagcccacatcgccaagtcaatcctaagccaaaagaacaaagctggaggcatcacactacctgacttcaaactttactacaaggctacaataaccaaaacagcatggtactggtaccaaaacagagatatagatcaatggaacagaacagagccctcagaaataacgccgcatacctacaactgtctgatctttgacaaacctgagaaaaacaagaaatggggaaaggattccctatttaataaatggtgctgggaaaactggctagccatatgtagaaagctgaaactggatcccttccttacaccttatacaaaaatcaattcaagatggattaaagatttaaacgttagacctaaaaccataaaaaccctagaagaaaacctaggcattaccattcagaacataggcatgggcaaggacttcatgtccaaaacaccaaaagcaatggcaacaaaagacaaaattgacaaatgggatctaattaaactaaagagcttctgcacagcaaaagaaactaccatcagagtgaacaggcaacctacaaaatgggagaaaattttcgcaacctactcatctgacaaagggctaatatccagaatctacaatgaactcaaccaaatttacaagaaaaaaacaaacaaccccatcaaaaagtgggcaaaggacatgaacagacacttctcaaaagaagacatttatgcagccaaaaaacacatgaaaaaatgctcatcatcactggccatcagagaaatgcaaatcaaaaccacaatgagataccatctcacaccagttagaatggcaatcattaaaaagtcaggaaacaacaggtgctggagaggatgtggagaaataggaacacttttacattgttggtgggactgtaaactagttcaaccattgtggaagtcagtgtggcgattcctcagggatctagaactagaaataccatttgacccagccatcccattactgggtatatacccaaatgactataaatcatgctgctataaagacacatgcacacgtatgtttattgcggcattattcacaatagcaaagacttggaaccaacccaaatgtccaacaatgatagactggattaagaaaatgtggcacatatacaccatggaatactatgcagccataaaaaatgatgagttcatgtcctttgtagggacatggatgaaattggaaatcatcattcttagtaaactatcacaagaacaaaaaaccaaacaccgcatattctcactcataggtgggaattgaacaatgagatcacatggacacaggaaggggaatatcacactctggggactgtggtggggtagggggaggggggagggatagcattgggagatatacctaatgctagatgacgagttagtgggtgcagcgcaccagcatggcacatgtatacatatgtaactaacctgcacaatgtgcacatgtaccctaaaacttaaagtataataaaaaaaaaaaaaaaagaaaagaaaattctataactggccaggcgcggtggctcatgccagtaatcctagtactttgggaggctgaggtgggcgggtcacgaggtcaggagattgagaccatcctggctaacagggtgaaaccctgcctctattaaaatacaaaaaattagccaggagtggtggcacgtgcctgtagtcctagctacttgggaggctgaggcaggagaattgcttgaacctgggaggcggaggttgcagtgagccgagatcgcaccactgcactccagcctggcgacagagcgagactcggtctcaaaaaaaaaaattttataactaatgtggaaacagttttatgataagataacatgtgcatgatggaacagagtgaacatttttgcaagactagtcaaagcaaaattcaagacttcaaaaaaaaaaatgtgtacttgggaggagcagtttgctttgtttatatcctcagaccctgggctatgcactcactttactctgctattagtaatgataataaaaagagctaatacttgatgtatctgctaggataggctagcttatacagtggtaaacaaacaaaactcaatggcaacacaatgcttatttcttgcttatgctaagttatcctctatgggctggcagagagctcttgtttatcagctacacagaaatccaggctaatagagcaaccaacatcttcagcatcaatagttgccatgccagagggaaagagaagcacaagaggctcaaagcaacaaataaatgcttcagagacaaagtaatccatcctttctgctcaaactcattggtctttcccaatcacttgaaggccaggaaataaaatcctaccatgtgctcagaaggcaaaacgccagaaatatttagtgaagagcgctaattgtctatcattcactatctaccaagggctgttctaattatattacaggcattatctcagctaagcctcataataatcttgtgaaataggtactattaatgttatcatcattcccattctatagatgaaataactgaggcaccaagaggctaagtaacctgctcaaagtcacacagataataggtggtaaaagctgaagatttaaacttaagcattcttgccccagagtctgtgtgcttaaccacaaagccatgagatctctcactaggtgggaacaatttgagaaacactgccataggcaatggagagccactaaaggattttttaagcaggaagtgtgagtccatcagaattggcatttaaaagctccctctagagagcacggtgaaggattaatttaaccagatttagactaaggcaggaaggctatttgcagagtgaggagatgaagatggggagggcttgaactaaggtacaatcaccactcaccgcaattaactgggttttgttgttgttgttgttgtttgagacagggtaacggggtacattgggggttggaggggtggttcttactgtgttgcccaggctggattccaactcctgggctcaagtgatgctctggctctggcatcctgagtagctaggactacaggtatgtgccaccacacccagtaactagttaatcttgactgtctatttcaactgaaaaatggttatggtaatacctacttggatgggttttctgaggaaaaacaccccaatgaacttgtgtgtttttaaaagtcaagtcccctaggcatggctagaagggaagaggcttagccagaaaatttaattgttgtgattaataaagtaatagaaatgtttagttttcctctgatgagatgaaagctttgaggggatcctggtcttgggagaaagtaaagaaatggaggagagggtttcaccagagtttagataactcttagcatctgcttactatcttccctgattaattatttccatggcagccagagtgaccttttaaaaccacaaatcggatcatgctgtttccctctcccctagtacagtgcctgatacttagaaatttctcagtaacatcgtgctcagtgaatgaatgaatgaatgagtgaatgaaaacacaagccagatggcaggtggatccctaaggaaaaggacagccaatgagaaattatgtgtagcaacggtggctttggatgatgatgtttaataatcatttttaaggagttgcctgttgtgtgctatgctttaatcactgtcccccacccttcccaaataacgttcagtaaaagtctgccacaaaaaactcgctgttttgtgagaatttaagaaatggaagaagaaacaaactgtctgggcaccaggccaaacaatatccaaaaaggcaggagtcacagaggagagctaatgagtattagtgggagcaggtattccaagtgagaggtgaccagagtcctctgaaaatgtggggagggggtgacgttcctatatcctgggttaggggcttggactcttctatttggctgttggaaaaaacaagctggaggactttggggtatcaacaaccctcaggttacataaggatgatcatagggtcgttgtgaggattatgttgggatagttcatgcaaagcgcttaacacagtgcctagcgcatagtaagagctcagtaaatgttagttgttgtcttccttcactttcttccattccctccactccctttctaccaggctccattcattctcttccaaggacacgcagggggcgtgcccaccccttccctccgcccccacccaaggcccgccccccgcttctccacggattggttcccgagaggcggagctgaaggaagagcccagtgcggcgcggtgggggcggggcgcatgcccgagctgggcagggtggaggtggggaggaagagctgccggaagtaggcggtggaggtggtagcggagctgacggcagctgccagggaaaccgaggcgcgggacgcaaggccagcagacaggccggccagagggtcatctgcgtccggcacccaggaggctcgtggtccgcctttgcctgggctgagggtctctggccccgcagcctctcttggaggcgggcctgtccctaagcccgccaaggggcgccgcgcccgaggggctgcggagtgggggacggacgcccccgacccgggaaggggcgtccggcggggccggaggagagggctctccccgctcaggaggtgcccctgggcgggggaccgggagtcctcaaccccggactgaggcaggggtctctgggggcgaggagggcgcgtcgccctctgcccccgccggcaccctggccatgacaggcaagtcggtgaaggacgtggatcggtaccaggctgtcctggccaacctgctgctggaggaggataacaagttttgtgcagattgccagtctaaaggtagcgcatcccacctggcgggccaggggtccagccgcgccggggtggtgggggtgggctgcgtgaagaggcggtttctgaagcttaggccgcccaactcggcttataagtggtaacgcgtgctgcgcttgcagtgagcctactgggctttctgcagctgggggattggtatgggtagagcttgcgagggcgagtctgtgtgtgtcggggagggtggaggtgatggtgcgggtggaagttgcctggcgtgttcaggtgagaatgtctgtatttgagggctctgaatgagttctgggccggctgtccagagagagctcccagcatgtcacttgcaaagctggggatgaactgcattgcgtgcgtgcgtgcgtgcgtgcgtgtgtgtgtgtgtgtgtgtgtgagagagagagagagagagaatgacgaggaggaggaggagggaagtgagatggcggaagggaaaactgcttaaatgatttttaaaggtggtgatttttgcttcctgctatttggttagcaactcctgtcattttgcagccttgctaagatctgacaagagtgcttaggtgactttattcttctggatgtgtgcagtgggaaactgccttatgcagtgacacagtgcggatttctaggcagtgtagccctggcttgtagagtgcgttggaggcctatgtatgagtggtggcagaaactagccgattatgcctgtagtgcaggatccgtttaatcagtggagagagaaagatgaattcgatgaattcattgcttccatggcgattacacttctaaaggtgaaatatgatcattgtaaattggcagaaccatttagtctttgttttctgtgccctagaagattcatgatttgatacaattaaaagtcagtacaataggaaatcttggttattagtgaaatgttggcacttgacatttatacaagcttctatgaatctttttttcctgtattttctaattcttttggcatataattggaggattgggaaaattattttccctttggttgggtcgaaatggatagttatattttgggggcgacaatttacttttgttcataatgcagtggatttgccatggttgtttgccgtacagcgtagtgggcatatactataaaacaaagattcagttatattcgtatttatctattttgagaaaggaaggacatatttaattgatgctttcacttaattaccttttatttttgaagaataaggttataaaaggagaacaggggagggatacatagacacctagtaatgtattttagtgacctctaccaacagataaatggaatgtgccattaggaaaacaaattcctagacttctttcctgaatttttgcattagcaataattcattttaaaaagtattttagaatcaatttatgttgagtaggttagcttcttgattcttgttacatcttctgttaggtctattggaagatttggtttattttaggagtgtatcttggctttattcaaattcccttatgtcctcatttgacagatcttgagtcacagtgaagcaacccactggagtgagcattgctgcatttggagagtcagatgccattttggtgactagaaccccccccccatttctcatattacccttatacttactcatattccaataaaatacagcacatggaagagagaggctgattcactacttcttcctccaaatttccattgctttttatttattttattttttatttttattttttgagacagtttcgctttgtcgcccaggctggagtgcaatggtgcaatctcggctcactgcaacctctgcctcccgggttcaagtgattctcctgcctcagcctcccgagtacctgggattacaggcgcccgccaccatgcccagctgatttttgtatttttagtagagacagggtttcaccatgttggccaggctggtcttgaactcctgacctcaggtgatccacccgcctcagccttccaaagtgctgggattacaggtgtgagccaccatgcccagcccgaaatttccgttgctttttattaataagcttactggggatcaggttatgaaatatcagttaattcttaatgagaactagtaactgctggcttgtaaactttattaactactgttgatggtagaatcctggatcctcaatttcttttcagaagttcgttttacattttaccaggtggcttcagggacttggtcattgtattaaaaatgagatgacaatgggtcagtcatctttagattatgacaaataggcatttgttgaggcctctgtttatccaatttatgaattacctatcccattccacccctccaagccctctcactctttttcccctgctgttttctaattttggttgtcataatgatcatttggacaactatcagattgttgaaggaaaagacgtttggatcaataaattgttacctgttagcgctgataaaaaatacatttcattggaggaggaatttaaaaagtgttggctaaaatgagaattgggtttcagtttatttacctgtattcctgtgtcctttcctaaaaaattggaagttaactgtacaggatatggtgagtgattgctcatctattaatatccagttagatgatgtggcatagactatcgacctatgagcaggtatttttgcaatgttccaaaatataactctttggcaatgacttttatttttaaattcttatacttatttaggaacatttattagttgactttcaaggtatgtgatttaaacttcggaatagaggctgggtgtggtggctcaaacctgtaatcccagcactttgagaggccaaggagggaggatcacttgagtccaggagttcaagaccagcctgggcaacatagtgtgaccttgtctctacaaatagttaaaaaattagctgggtgtggtgttgtgcatctgtggtcccagctactcaggaggctgaggcaggaggatcacctgggcaactgagcccaggaggtcgaagctgcagtgggccatgattgagtgccactgcgctgcagcctgggtcagagagcaagaccctgtctctaaaacaaaacacaacaaataaacatcagaatagagaacaagcttgtgttctttttacttcgtacaagttttgttgatcctggggtttttaactgtcctgggcacgagtcttaccagtttctgggaccactaaaccattccagtaatttcagtgtgggaaaggaaactgctttggggctgcctatttaagaaatgctatgattctctctaggctcaagatgtgatttcttcattacccaaagccctggggttaatgtgacttttagggtgaacttttggactaacttaggtagtgatagaacagaggacaaaactactgaaaattccagatatgtcaatggtaactctggctgattgaggctgggttccatttttgggtatgggtcatacttcctttgtacttggggtcatactggtccaagttttaacttctagctcagcagttccagattttatcagtgtgtcaggaataattgctaagccaccccgtcagagactgtgttttaaactggacactatcttatttaccatgaaaggatctacagttgtcctttggtatccaggggggattggttccaggaaccttctggggtactaaaatccacagatgctcaagtccctgatataaatgttgtagtgcttgcatataacttatacacatcctcccttatactttaaatcatctctagattacttataatatctaatacaatgttaatgctatgccagtagttgttactctgtataatttagggaataatgagaaggaaaaaagtctgcacatgttctgtacagatgcaaccattcattttttactgaatattttctttcctttttattttttttagagacggggtcttgctctgccacccaggctggagtgcagtggtgcgattatagctcactgtagcctcagactcctgggctcaagctgtcctcccacttagcctcccaaagtgctgggactacaggcgtgtgccacggggcccagccattttttcgaatattttcaatctgcagttgtttgaatccacagatgcagaacccatttctaatggagggctgactatacctttctgatgacctaaatatttgtgtccactattgggacactcctttcttagtgtcaaggtttgtgagaaattgagggctgtttgatgggcaaagatttatttatttatttactggcttatctacaattgagacagggtctcactatgtttctcaggctagttctaactcctgggctgaagcagtcctcccatctcagcctcccagagtgctgggattacaggtgtgacacaccatacccggcagagcaaagagttaagagtacaagacatttgatcatcttgaggagtatttacttcagactgaaacaccacatgaaattctagagtccaacagaaagtgtaataattttttgcttttcccttcttctgctacatcctatctctgaaatgtttcaccccacccaaccactgcctctgttccaactcctatatttttaaatctacatttaaatgtactttttgaaaaaggtagcactttcatgtagttcaaaatccaaaaggtccaaaggggaatatgtacggtataaaatcattctgctgtccctcatctctgagccaccattttcactccgtggaagtaacaattgttggcaatttcttttcttttcttttcttttttttttttttgagacagagtttcgctcttgttgcccaggctggcgtgcgatggcaagatcttggttcactgcaacctctccctcctgggttcaagtgattctcctgcctcagcctctcgagtagctgggcgcccaccaccacgcccagctaatatttgtatttttagtagagatggggtttcaccatgttggtcaggctggcctcgaactcctggcctcgggtgatccaccaacctcagcctcccaaagtgcttggattacaggtgtgagccaccacacctagcccattgtcggcaatttcttacgtgacttttaagagataatgtatgcatagacaaacaattacatttaaatatattcctttgcagtgcttttatgcaaatggtagcatattacccacagctcttgacatctgtatttttcaatcaacagaacatggagagcatacactttccatgcacattgaggagtgctttgttctttgaaggtattttctaaggctgtgaccaagttatcttgactaagtagaaagctattcttaaatgatttggaagacactgttgtctctctttttttttttttttttttttttgaggcggagtcttgctatgtacagtggtgcagtcttggctcactgcaaactccccctcccgggttcaagttctcctgcctcagcctcctgagtagcagggattacaggcacctgactaatttttatatttttagcagagagaaggtttcaccatgttgtccaggctggtctggaactcctgacctcaagtgatctgcccaccttggcctcccaaaatgctgggattacaggcatgagccaccatgcccagcagacactgctctctttgaaggcatcttagaaagtgtcctaggcccatagacacatataagcctactgttaagatggcagagaggcagagtaatggaagagtctgtagacttggtattggaacagccagttaaattcctttactttgcttattgcagcttggtgacctgattccacataccacctaactttctcagtttagttttcctagtttgaaaaatgaaagtgccttgtaaactaatgtgttacacaaatgtctgcattatttacttttaccattgctaatcataaattttttaatcttgattttattagttttacttttgactttattcccttttaagatagtctggttactgggagccacagttagaatgactcacccagtaattccctagtctttaagccaaaaccatttcctatatatggagttctggcatttttgcaaatgtgctttatggtacccttgaggatggtctctggatgtttcccgatttcaaacttgtatgaaagattagaccagggaatttctttgtgtagaaattttctcatagttgtcttaagttttaactcatgtacattaatctttagctttgctttacatttgttttctgttgatagccaagtcattgcttgttaaatattccttagaaatgaactttcctatcaatttaaaattattttagctgtatctgtggcacttttttttttttctcttttgagatggagtctcgctctgttgcccaggctggagtgcagtggtgtggtcttggctcactgcaacctccacttcccgggttcaagccattctcctgcctcagcctcccgagtggctgggattagagacgcctgccaccacacctggctaatattttgtatttttagtagagaggggtttcatcatgttggccaggctggtctcgaactcctgacctcaggtgatcgcccaccttagcctcccaaagtgctgggattataggtgtgagccgccgcacccagcctgtggtaccttttaaaaagtaaaaaattcaatggcgtgaaacaacagaaggagttctgcttccatttctagttgttaaacgcctttctctagccaagatcacatatatttctggttttttatagctagtgcactataactctgacagtcatggttagattgatagttttactgaaagtaatttatcaaaatccccattagattgtcttttaatgtcaacatattaaacctgttccctgagagatactttcctatttgttctccttgccctttaaatatcatttggtgccagtgagatgaagaatagaaaatgtatatcttttaggggaacttcgcaagcctgagatcccccactacatatagtcattcagaaaatgtttcttaagcacttactacctactttttctcagacattgtaccgggacatatagattaaaagaaagagtctttagtctcaaggattttacagtctaatggggaagcagatgtgtacaaatataaatgatgcaatacagaaattattgtggcatggtatacagggagaaatgaaagcattgaagaaggcaaagaagtcttcctcgggaagtcatggcttcaaagagaaaagtaggctgtgtcttaaaggataagtatgactttgccaagctaatttagggaactttgtattctaggaagagggaacagaatgtgcaaagcctcgaaggtgcactgttttgtgtgtgtgtgtgtgcgtgtggggattctttagtatattttgactgcatgttgaggagtgatgaggagtagagtttgacaggtagtcaggatactgtaaggttaaaacctgagctctgtggttgacttgcttcgtggcattgagattttgaatatgcactgtgctttagacttcctgttgtgtaagaagcccatagtattgtaggtccacctgctattcacatggggttataaatattgcaggcatgaaacgcttcctgatcgctgaatagtaagaaaggtctgagcatggtgccgattaaattctccattgaaatgtacctttgtgggtacattaaattattttagcataagtctagtgaagtgccagcagtagatactatgttatttctggagctcttgatgttgatttttgaggctgaacatgctcttagcctcaagcaggtcatatttggaatacctgatgtgtgctcctggttgctcagtgcttaggatgcataaacaggtagctgcagtctcatctctcagtatatatacttttcagcaaatcttttttttctagataaattggaaaactaccttttttctgcatttttcatctgatgtcattatggtatgtaggtggcagctttcttgggcacagttgtctatataactgttcatcacatgagtcattgtctgtttctgttcttctgcctgaaaattccatcttggaaatcgtgtcatgcaatcggtgactgcgacattctacttgttatgtacactgccactggctttgtatgttatgttgatggactctacctgtgctacagtgaagggataaagtgacttattaaattgagtcagactcagttcctccaaatggtatttcctgtaaaaatgatgccaagcaagattctgcataaaacatgcatatgctttacactgtaagcatacagtgcctaccttttgttattgtgtctgcttaaatccttaccacagttgtactcctgtttgatcaagtggccagtttaactagatactagctttgaagaagttctgtattggcccctggaatgtgacagttcataccacattgaaaaggtaagaaccaagtctttgtagagtagaacaccttaaagttaatccacttttaccaaattcctctattgttaaagcaacagtcctatattggctaatttttaaaatcataatgtgccacactttacacatccctagaatgtaagctagggggcaggggcctatgcctgttttgttcactgtagtgttcccagcacctagaacagtgcttggcacagaccaggctctcagtaaatatttgtttgaatgcatgaattgattttatcatctgtaaatgttttgtttcatattagaagagaccttttctaggttatctgaataattgttttaattcttaggaaagctattaattttctgaaaaataagttttaaaatatgtttggaaggccctatgtcagtcaaggaccagtcagaggaacagaagccactgttggtcttataagcagagggaatttaaaatagggagtaggttacaaggctgctagaagagccaagaagctgaacaggggctggtgaggcacccattcgattagcaatgcctgggaactactatgcctgcaaggaaaatagtgcactggtgtcaccaagggctggaagtccgagtggtctggtgtgagcggaagcatggaaagaggagcagtctggtggcagctggaagtaggccgagtgagagagcgtattaccctggctgctccctgctcctgcctcttatcctcctcagtgcctcccattgatggaacttatcctgaaatcagttggcaaagggagcctgggagatgtagttccctgtgatcaagcggagcaagggagggatcccagcgcaaacaggcaaagacacaaaggcactgaattctccaagatgtaatttctttccccttatagtatttgaattattttggacaagagaacggaagggttttccggcagatataacattgcgtgcttctaaaggatcttgactgttgctgaaacaattattagtcccaggaagtaatgtaacaactcagtcatagtttatatacttagggggtatgactaggcaaattggctcctgtattgaatatgtatttgactgttggctgctgccaggagcaacttatcgtttggttactcagaaaataagttcccaccctgtcaattctgggaagtcttaggtatggtgtatccacattgagtatatctacaactggacagcttgagttagtcacacagaagccatacacagaaaatgttgaggattgcagcgttaaaacatggtacagctcactcttttttttttctttcgtttttctggagacagagtcttgctctgttgcccaggctggagtgctttgatgcgatctcagctcactgcctcctctggctcccgggttcaagtgattctcatgcctcagccttccaagtagctgggattataggtgtgtacctccatgcccagctaattatttgtatttttagtagacacagggtctcaccacattggccaggctggtctcaaactcctggcctcaagtgagctacctaccctccttggcctcccaaagtgctgggattgcagatgtgagccaccaaggccgggcctcagctcagtgttttctttacagttaaggtaactgcagtgtggctgttttatcttgtgctgcatgttagtttaactagtcttattgatttgtttgttttaccccacaacttcagataagtttgcactgggtgagggaggcaagatcactgggtctgttttcttctaccctgacctgaaaaaaatattttgtcttgtaaggaatgttgctgctgctccatttaagggcagagctttccaagttgtggctacttgttttctacgtgattataaaagtgtctaatgagttatatgagacaagttcagccctttctagaagtgctttttttgtcaatcaggtcacctgcatttgggcccttgctatattaatggaattggtggaactaggccagcagagttttcagtgcagtgtgagtatgtttgcttttaggctgttacttcccacagaggccacagataaaggactctcgttgtttgagtgaagttaccaactgtaacaattgcataggtttccttgtttctttcttttctccaaaaaactcatttcctcttggcaggtgttactataattcacaggtgtaatgaaaatgtaatttgggatttgaaaaagcatatcagactgcttcccagagtaccagttcttttcagctggtccatttcaacttaagaggtccatctatgcatttttgaagcttcatatttaataaatataatatttcactgctgtgtttgactattccgtttcccacactttctccttccctaccccactcttctggatcctgtgtttccccacaggctttgtgaatgccggtccactgatggctgaactgcaggtctctccccagtggaaagccccagagatgagccagatctgcctcagctgtggccatccgtcagcgtaaggttgctctggtggtcgtcttcagtttgtccagctcttccccttatcccccatcctccctcatgtgtggctgaagcttgccctggaatcccacctttgtagcatgtcactcggtagtagtagaattttattattgttgctttttttcattttcaattaatgttaagtgattctctgacaaattttgttgaccatagccctcttttcccctcagttcatagatttcctataggaattctggtttgcttttaaatacatatagaatacagtttatttaagttctggatttcataagcttacttggaaaatacttttttaaaaaaaacatttcaggtcaaagcttccaaaaagaaatttcttaatctgaaacaatgagaactgggttcctcaggcctcatgtcatttcccctcacccacaaatcaaatgtgtaatgctctcattttatgatgtattgaaacagtgaagcaaatgcgagagggagagagacctactctcagctgtagctgataagtgtgtcctagcatggtgatttgagcaaatagagcaccttttcttttccttttcttcaaatagccatgctgtcttttgcagcagttgctggtgacggaataccataaatccccaggcctctaccacagagcttacatctttagatgtgggtttacatgttaatcctacaatgttatttcacctcagtggtctgaagtgcgcacacagtacattttgttctttaacttcctcttttcttgtctaactggaagtccccaaatgtgtggatttagaaatgagttctctagtgtttctagttttgagttaaggaagttttgtcttgatattgtttaggtggttgtttttgttctgtgccttcaaaaataatttcttacagaattttctgtgtgaactggtgacatcatatgctgtagtgtaaagcttgtagagaagggggcattggtgtctttttgttgttgttgacactttatcactccttataactgacacaaaccctgagaagagaaacaggaaggaaactccctgttcttaccatgatgcttttgttcaaaatagctgaaaacagcagagctgacggaaaccaatttgagtgtgacagctgatttgagaaagaatgaattaagagattcaggctcttctgctatgttgaaatcatttttactgaaagattagctgtttggaacagggattgactttgtctctctgaaagtaggcatgaagagttcggttagaggaaccgttacagatggaggagaaacttgaggaaaggtctttcctgtagtgtgactacagtattaacattcccagattatatgaaagagaaaggaagcttcattaaatgaaacattggaatcaggaagactccggcttggctccctgagcattctaacttgttctgagcctagtctcgacagaagtagcctgacacaagtggctcagatcaagggtccatattacgggcagagtaaaaataggtcccagtttcattagacttctcatacatttaaggaaaaaaagatttgttgccataggaacagaccagttgttttctgtcttgtgggattttaggagctggggagataggaggatccctgtgcttataatctaaacatcagtaaatgctggttttttttaaaacaacaacaactttatcttttatgattctgaaacctatccacgataaaaatcattggaaagtatgaaaaatataatgatgctgaaggtatttttcataattcttttttttttttttttttggagacaaggtctctcgctccgtcgcccaagctggagtacagtggcacgatctcagctcactgcagcctctatcaggcttaagcagttcttctgtctcagccttcatagtagctgggactacaggtgcacaccaccacgtccagctaatttttgtatttttagtacagacagggttttgccatgttgcccaggctagtctcgaactcctgagctcacatcatctgcctgcctcggcctgccggagtgccaggattacaggcatcaaccaccatgcccagccttatttttcataattcttatcacccatttacttgagcttataccataatgattttatatcattcttttttgcttaacatttattataagcttatttcatgacattaaaaacgtgtaaatacctttattgtatcccagcattggaatatgtcattattatctcttgcccaattgttaatatttgaattttcaattttttaacaatacaaataaggaagtataaatttttgtgttgttgttagagtgatgggttatttatgtgttcagatttgagtagtcaagtgggccctctaatttaaaaagttaccaaggggattctctgggttgagcccacgtagagatggctttgctatgggcattatcattctgaactgcttcattgcagtagatgtctgctgaggcaaggaatggggaattcgggagaaccctggtttccccataagggacctaaggaacataagggacataaggaacagctttatgggtcataccacagcaagatgggccggcactttcacattgagaggtgacagcgtgctggcagccctcacagccctcgctcgctctcggtgcctcctcggccttggcacccactctggccgcacttgaggagcccttcagcccactgctgcactgtgggagccccttcctgggctggccgaggccggagctggctccctcggcttgcggggaggtgtggagggagccagctccgggaaccggggctgtgtgccgcacttgtgggccagctggagttccgggtgggcatgggcttggcgggccccgcacttggagcagccggccagccctgctggccctgggcaatgaggggcttagcacctgggccagcggctgcagagggtgtgctgggtcccccagcagtgccggcccaccggcgctgcgctggatttctcaccgggccttagctgccttcccacggggcagggctcgggacctgcagcccgccatgcctgagcctccccccgcctctgtgggctcctgtgcagcctgagcctccccaacgagaccgccccctgctccacggcacccggtcccatcaaccacccaagggctgaggtgtgtgggcgcacagcgcgggactggcgggcagctccacctgcagccccagtgcgagatccactggatgaagccagctgggctcctgagtctggtggggccttggagaacctttatgtctagctcagggattgtaaatacaccagtcggcactctgtatctagctcaaggtttgtaaacacaccaatcagcaccctgtgtctagctcagggtttgtgaatgcaccaatcgacactctgtatctagctactctggtggggacttggagaacctttgtgtggacactctgtatctagctactcttggtggggatttggagaacctttgtgtccacactctgtatctagctaatctggtggggatgtggagaacctttgtgtctagctcagggattgtaaacgcaccaatcagcaccctgtcaaaacagaccgctccgctctaccaatcagcaggatgtgattggatggggccagataagagaataaaagcaggctgcccgagccagcagtggcagcctgttcgggtcctcttccacagtgtggaaactttgttcttttgctctttgcaataaatcttactgctactcactctttgggtccacactgcctttatgagctgcaacactcaccgcgaaggtctgcagcttcactcctgaagccagcgagaccacgaacccaccgggaggaacgaacaattccagacgcgctgccttaagagctttaacactcaccgcgagggtccacagcttcactcctgagccagcgagaccacgaaccccaccagaaggaagaaactccgaacacatccgaacatcagaaggaacaaactccggacacgccgcctttaagaactgtaacactcactgcgagggtccacggcttcattcttgaagtcagtgaaaccaagaacccaccaattccggacacaacattatatacctgatgtgcggaaatacccttgcgccattgactagcatcttatgttgttcatacagtcctcattcacttaaacttagtcctctaaggaggtggattagaggtcctacattagtagaaaggaggtaacagctactgcattattatttttttttgaagaagggccctcagactggagatgaggacagggactgtgttttcatgtctatctgcatacttaatgcacggtgtctggcacatagtgtctatgtccctattatgagcagcattattctgttaatgtgtgttcaggtcatatgctttgttttgttttttgatagtcttcctcatactgttagcccagatagctgaagatctgtgacaccaggaagctgagcaggtgaatctcatggttgctttgtggtaattgcttctttgtgccatttcatttctgtgcttctgccacctgtgctgctttggaagctggagctagacatgaagcgaatcctctgccctctcagtaggaggttttggtgtgacacatcatcctggggaaaaatgtagcatgaagtgtgaaacaggaggctgaaatagcagtcctttagcccttttgtgggatgggagtaaatatttagacgtggttctcaggtgctgtagaatttaataaccttgcagcagttttagaaactccttgtgcccactggaacaggttcgtttaaagaatcttacttgggctcttttgaaattgtgatgcccccacctccacccactcccctcccccgcccacccccagacctgccctgagttcatctgcctaatgttccctttgcaggatctttgtactcacatggctggtatctttgccccacccccttgtgccatatattttgacctcattgtgttctattctgaaacgcctgggttttgaaacatcgtggtgaatgttttctttttcaaagggcaaatctccatcttttgctctcctcccttaagccagggctgttttgatgactgatattctgcacaccactggactaaccaaccatctgtactttgatcccagaattcattttgattctgctgtttgtttagaactgaaagctttctagcttgtttggatgtggttgtgattcagtgaaactggcactgattttccatctgtttgccattggttgggacttctccaatgtgttaggaaagctgctgtgctgagttgcgaagagaaattcacatgtccatggtcttgcacaagggctcatttgctcacttagaaggttttatgtagagcctctgcctgggtgaaagacatgagcttccctggaaacaattgaaaaacatcttctgcctggccactcagtcttgagctctagtaggttacactgtttttcccttctgggcttctttttgaggaaggggagtgtggatgggaagaaatcttcacaatcagtctcagattcccagcagcagagagtgaattgtatgttgtaataataaaaaaaagaatacctaaagaacaagatatcaatttagtgaccattattgagcatttactatgtataacacacatttgggtgtgtaaaggtgattctaatttcagtccagctgatcctttcttctgtgaacttgggcaaatgacttgacctctctaggccttagtttctccaactgtgcttagactagatcattcctaaggtttgttacaattttagaattttgtactctaaacgtgtatctgtttgttacagaacaagagaggcttttccacaaaattgacatattcttatgtctcacttcaaactaaatggcttaaaaatggttcctctagagcaggatttctcaacctcagactattgacattttgggtgattccttgttgtgggcactgtccagggcattttagaatgtttaggagccagcattcctgtcctctgcccactagatgccagtagctcttccctacccctctgcccgttgtgacaaccaaaaatgtctctagacatcagcattgccccttgaggggaaatcgtttctgttgggagccattggtctagaggaacaaagatgggactatttgaatatgggctgtttttaatatcagttttcatgttgttccactattgcttattacctgtttaatcagtaagcatgcattaagtgtatactatacacagatgaatgccgacgcttgattatgagggactttaatgaccatgtcaagttttcaaatgttgagtccacctggccaactttgaaatgattgcccagctgttagcgcagcagtccctacacgcctacacccaccagcctgctattagccttggtcagggtaatgattgaaatgtatgaaagcattcactcacaaaggctatcagatagcaacctaggaaggccctgggattgtgagttatggatcgggactgggtcttgtgcatccagaatctagtattatgatagttatcccttcagcttcctaggggaaaaaaattcctcgtcaaagtggtggggtgaggaatctatcctagggatggaggatgaagagcaatctcattggacaatgaccatatcaccctttttagtagcttcttctaaacataggccctttccctcccgcagtgggcaggctcactttgcagctttagttttttgttttgttttgttttgtttttgtttttaaatatatgagtagatactggttgttgcaaagaggaagttaaactgaagtaacctaaaaatgtaaagaactgaatgtccccaggagatgaagacagtaacttgagaaccaagtttgcttatattacctgaagtgaggtcactaggaaattggtttaattatagtatcaagttttgaaatatcaggtccacctggctgactttgaaatgatttgcccagctattagctcagcagtccctccctgcacaccaactccacccagcctattgttagccattgaagtggtgattgaaatgcattagattgcccaagaaatctaatctttggacttgctacatttgctataaaatatcagtttaggtttaataactttgaatttgctcccagtacccccagattttctcatctgttttaaattcacattctgcacttggtcgggtgcagaatggtgcttctcgctgattggggtagagtgtgttctgtgagcatctttgctgggatgctctgggattccaaagccatgattcagacacttaagcctgtgtcagtccctatccttaggtcctggcaggctccgtgttccattccagctgagcctttgctggagtaattacccacatggagtcttcaagccaaacaattgtttgtactgagatagtctcactgtttggctcctaatgaaataatctctttcctgccctcaatgaaagcagctattttttgtgtcctccctcccctattcagagaagccatgtctcatccaccactcttccagcttattcataaatgctttaagcagggtctttgtgtaaaggaaattggctggagctgaaatatcataggctaaccaggagacaaggagcattaaggacacccttttccttgactttctatttagggtatttaaattacctttctgtgattttctgtaataagcaatctaaaacttaaatccacataagcaaaatagtcatactaggtttttaaaaagtatactaaattaggccgggctcagtggctcatgcctgtaatcgcagcacgttgggaggccgaggcaggtgcatcactaggtcaggagatcgagaccatcctgactaacatggtgaaaccccgctgtctctactaaagacacaaaaaattagccaggcgtggtggcatgcacctgtagtcccaggtattcgggaagctgaggcaggggaatagcttgaacccgggaggcggaggttgcagtgagccaagatcacaccactgcactccagcctgggtgacagagcgtgaatccatttcaaaaaaaaaaaaaagtatactaaattagtataattttattgttgttgttacctaaaggagctctcaaaaataaaagctggccaggcgtggtagcacatgcctgtagtcccagctactcaagaagctgaggtgggaggattgcttgagcataggagattgaggctgcactgcactctagcttgggcaacaaagcaacaaaccctatcttagaagaacaaacaaaaaacccaacaacagaacaaccacaaatgagtgagtgcagcaggagaggcagcagagcgccgtgggagttggaataggaaggagaaaaggcttcatggggaaagtgggcagagcaagatttgcacaaaaagatgttttgcaaatagaggaaataggccctgtaaagctatttgtgagagactgtaagttgatcaacaaagtgtaagtagttcttctaacttttttttttttttttttttgtgacagagtcttgctctgtcgcccaggctggagtacagtggctcaatcttggctcactgcaacctccacctcccaggttcaagcgattcccctgcctcagcctcctgaatagttagtattacaggcgtgagccacaatgcctggctaatttttgtatttttagtagagatggggtttcagcatgttggccaggctggtcttgaacccctgacctcaggtgatccaccggccttagcatcccaaagtgctgggattaaggcgtgaggcaccgcgcccggccacttctaacctttttaaggagtatttgcgtgaacagaatcaatgagtttcttcaaattaacttctgacaataatctaaatggtctccattttctgattcacccttttttccaattccaagttgccattatccatgtaattggctctaaagagagcaaggaaatctatcttctccaggagtttcagtcatagatttttagctggctctctttatcatttgcaactgagttcattcatatgcttgttttcaagaattttttcctttagttccagaactctttgcttccatcctatggtttcttgggaggacagttctaagctttcttaagataagtgtttcaatcacaccatctaccatttccctcagaagttgttctcctcttatgcggtgtgtttaggtgtttggggcgccaatcactagggattggaaggattttgatgaatcttcaagtaaccatgtcttgaaggttagccatcatcagttcactccatgaaatgaaaacttacggggatccacttttgctcttttttgaagaagtctattgtcctcaaaggaagaggtggacctgttcagatttttaagttttatcttattcagtgtttgtagcatcaagggactggcctctaacggaagcaactgggggcttcattggcttatgcaatcagtctcatctcactgactttacaaggttcttcaatactggcagaaaatctcttggctagctctttctccctccttaaaatatgttggctctttactataaaaacaatcatagcagcacataccagaatctcctagggaaacccccaaagacttgggccttgtctcagctctcagacattaccaccaagagcactgcatagctttcccaggaccaactggaaagaattcttttttacgacgatgtaattgacaatgaaaattgtatatgtttacagtatacaatgtggtgttttgatatatgtgtacattgatttttgtggcagtcaggaggtcctctagttggaacagagactcaccacacccaagagtccctctgtctgtatcccatccccaaatcagaaaaaggcctgtgcgtctctgtgggtagtattcactctctcagattcctctgtgagtcaggaacatgacaagtggcatctatatacacagttttaagaggaagtgatgtcactcttggtgtatagaagtgagaagaggagtaatgagaattaaagacccagatcacaggagaatttaagccatacttagaagtttggagttcagttgatggtggggggtccagtgacatagctttgaatggggtgatgacattatcaggacatatgttggcagaatgtccttttcaaagccaacaaagtccaaactaggatctcattctttccctcctgaagtcacctggggaattgaattgataataatgatacaggatgactgattgatagttctttattcccagaaacatcacctaagtatacactagttaccttccactgctgggagagacaacaaggaagagtcacagtaagtccctacctgttaataataaaccaatggccaggcccagtggctcatgcctgtaatcccagtactttgggaggccaaggtgggaagatcacttgagcccaagagttcaaaaccagcctgggcaacatagcaagacctcacctctacaaaataataataataataataataaaacagggcagtaagattaatgtggagccaaatttactaaaagttaattgccttcaacctttccagagtagtttaatgaatttttgagatacagttactatcttttagaagagatatgtttgagataatctggttaaggtatattgacttgtctaaagtcacacaggaaattagtgctgtaatttagataattcgtatctttagctgtgtagataagaagggccagttaaataacatgagaaagatgaagaatgcctccttcctttctcctagtagacctcagtctgctttcctgttgatttctttgtgttacaggctttaatgttttttgagaaaagccattttaagttaactgctgaattagttttagacatagattgactaatcatttcattagtgagtacttagcagtgttctacctcccttaacctcctttttccggttacctggtaggaagataatgttgctttgcttcatctccattggtaatcacagcagtctgtctaattgctatgtctgttctatcattgagctcctggattaaattggttcagcgggcttgtattttggttgagtatataagtggctgctttcttctgctagaatctccaaacctccatctttatctttcatactttgatatattatataagtatggggggagtaaaaagcagcaccaggatatcaaaatggtaggaagagagattaatgggactccgtataaggaaggcctctctaatagtgggtgccgtctaatagacaaaccaactaccttttgaaatggtacgtaactgactcagcattggacaagccaggtgatcacccctagaaggagggtgcattcagtgagaggctggacctaagaggatttctaaagtcctttccacctctgattttctaattttaaatttcttggtgtaggatttacctttattctctaaccagtctcagacatgttttaattttctttgtctcagacatttttaagcttaacttatgctcttttttcaacagtacaaatgtggacagtgtttctttttgacaaacggaaacaacattcttgcaagatggcccagatggaaagggacttgtcttgcaagtgttctgaaagcagaggttgattgcataagcctttattttggtctcatggttccttaaaatgtttgtacttacagaagttcaaagttactgtttattgttattttggaataaggaacttgatgaactctcttttgtgtggatgaaaacatagaggtaaacatacctctcagcagccctacacaatttttccaagatcccactggtgtttctgtgtattcttccttttcagtgaatcagagaatggagggatataatgagtggaactgaggtaactggcactagatttgttcttaaaacaaatactgctgctttttttactttgacttccaaattttgggtcagagttaatgacaagttatgtcacgtagaattaatctcttataaaatctgagtttgttgatttaggtttttccttatatgtatgttgcatttaaccagttttcagtgcctggtataggctccatgaaccaaatttgattccgtgttttaggttcctcaagacctaacatcttcatagattgtttgtttcattttacattttcagaaccattgaacggtaagcaggaagggacctaaaaattactgcaaatcatctactgtagtagtaggactgtagtagtagaaagaactgtagggctcattgttcacccaattcaccacatggggatcatttctctaccatccctgagaactgattaccaaacctctgtttgaacactgcactaactgagattttacaatttctggatatgctgcattggtttttacacaaccttaattgttagaaaatttttctctagagtgtgctaaaatcaacttctactccttggtgccagttctgcttttgaagcctttccaaagtaacctaatccgttttctgtgttacagctatcctttaaggcatttgaaaacttctcccttcattttgcaaaacaggaaaaatatatacatttatgttgcttattgacgaattcatttaacacacatttattgtgtaccatcttctgtttgctagcattgtgtcaagtgtttgtgataaatgatgaaggaacatggtcattgccttccagagctcatagtctatttaggacaagagagacctgtaagcaactcgaacaagatattaagtattagaagaacaaagcataccctgggctattagcaatagagaaagttagggtttattccattggagggcatcacagatgaactggatttttaagtttgtcaagcagggaatgagggagaaagccattccaggtagaaagaatggtgtagtcaaagagatttgagtgtgctgcatatttcacaattatgacttcctcagcatgtgtaaagtacaaggctctcaacagactttatatattatgttaaggagtttcaacttaccctgcagccagtaaggagccctggatgcttacgttgttttgtttttacgatatctgtactggtttttcccattgcaaaattaatagaaagctcattgcaaacaattcagagaggatatatagagaagaaaatagatgtttcattatcccattatcccgatatagtaataatttacatatagtcttctagattttttttctgtgcatacgcgtacatttatttatttatttattttttgacaaggtctcactctgttccctaggatgaagtgccatggtgcaatcatagctcattgcagcctttgaatccttgggctcaagcagtactcccgcctcagcctcccaagtagctaggactacagaggcatatcaccacaccgagctcatttattcatattttaaaaaaaatggaattgtttcatgtgtactcttttaatactggatttttaaaattactatatcatggagatacttttatatgaaatagaggctccaaaatttttccccgttaaatggtgataccataattccttaatgtaacctattaatgtttctaattttcataaagatgtaataatgaacattcttaacgtatttctttgtgtacttgacctgttttttccctgatgaattcttacaagtggggtcaaaggatttacttagttcttttgtttttttgagatagggtgtcaatatgttgcccaggctggcctcaaactcctgggctcaagtgatcctccaacctcagcctcctgaatagctgggactacagacatgtgccactgcacctagaatacttagttttaattaatctttaagcaaatgttgcttccctgctatgttcaaggaaccatgctatgccgtgagtatatgatagtgaatgttacaggtctggtgacagctcttgtggcacacatagttaagcgggaaagacatcttaaacaatcaaataattagatagtaacaaaatatggtatgatttagaaaaagtaaagggtggccaggcacagtggctcactcctgtaatctcagtgctttgggaggccaaagtaggaaaatcacttgaggccaggagttcaagaccagcctgagcaacatagtgagaccctgtctcttttttatttcattgatttatttttatttttatttttttcagacagagccttgctctgttacccaggctggagtgcagtggtgggatctcggcccactgcaacctccgcctcctgggctcacgtgattctcctgccttagcctcccaagtagctgggactacaggcatgtgccactacgtgtggctatttttttttttatttttttttttttatttttagtagagatggggtttcaccatgttggccaggcttgtctcaaactcctgacctcaggtcatctgtccacctctgcctcccaaagtgttgggattacaggcgtgagccaccgtgcctggcccatttcttttttttttcttttctttctttctcttttttttttttcctgactcttaacaccactcaatgacccatctttacaaaaataaaaaattcagctgagcgtggtggctcatgcatctagtcccagctacttgggagactgaggtgggaggattgcctgagcctgaaagcccaaggctgctgtgagctatgatcgcaccactgcactccagcctgggtgagagagtaagaccctgtctcaaaaaaaaaaaaagaaaagaaaagaaagagtgaaaaaaagagtaaagggtaaatgaaagttcataacctttaaaaaaaaagtccttatcttttagagatatatgctgaagtatatacagatgaaatggtatgatatttaggatttgcttcagaataatccaggttggagttgaggggcagtgggtgggagtatagctgaaacaaaattggctaggagttgataattgctgaagctcatggttaattatgctctgctttcgtttgtttgaaattttctgtaaggtaaaaaccaaaagaaagggtagaagagatgttacagtcgggtttagactggggagccaaggaaagactcctttgaggaagaaacatttcagctgagacccttgtgatgtataggagttggccaggctgcaagtggcatttggcagttagggaaagagtttttttaggcagcaggagcagcatgtacaaagtccagcaagccctgaggaaggaacatgttggtcccttgaggaaatgaaagaaggctgctaccataggaattgagaggctgcggaaggaggcatgggctagacctttaagaccttggaaactatgttaaggattttgttatttaatccaatagtaatagaagaattttaagcagcacaatgtggctttgcttctttaagagctcaagttggctgtttggtggagaatggttttggtttgggctcaagggagaagagaatgtaaaagtggagagagagctattaggaggttattgcagtggtccgaaagagtctggtggctttagattacagaaatagtgatacagatggagagaagagatactgatttgacagatatttttgtcttggtgatgtgggggctgaaggagagaggtttcatgatgcataattttctgactgacgcaatggaatggatggaggtgtagttgactaagatgaagaaaaaaggaagagattttgtagcaagagattgagagcttagtttggaatatgctattcagaaaatgtgcaccaatttacatatttacctttgtgtatgagactacatggaaggtttatatttagaggtgtgatctgtacagatttgtgttttagaaagattattctggtgggattctggagactaattgcttgttagtctgtgagctttttgaattgaggaatctcatccttattttctctgcctttgtatccccagtacttagcaggcaaattgcttggcacataggtacacaataaataatgttaagagaaccaatgctggttgggcgcggtggctcacacctgtaatcccagcactctgggaggccgagaagggcggatcactaggtcaggagatcgagaccatcctggctaccaaggtgaaaccccgtctctactaaaaatacaaaaacaaaattagccgggcgtgatcgcgggcgcctgtagtctcagctactcgggaggctgaggcaggagaatggcgtgaacccgggaggcggaacttgcagtgagccgagatcgcgccactgcactccagcctgggtgacagagcgagattccgtctcaaaacaaacaaacacacacaaaaaagaacgaatgcttataggtgagacatgaggtctaggtagaaatggatagattctggaaaagtttccaagatagattccacaggatttggatggaagatgggaaagttctctcccttcgcgtagcctgcccgttgaactttttgacaggtccgttatgccagcaggtctaaatataggtagccatcaatttatcaatgttttttcctcctcaatatttatttgtttggaactccatagattagaactcaatgatataattattataatattagtagtagcttgaagtcctccatcacgctagttccccttttctgtctgctgagttgtcaatcccagagcccctctaatcctggcagctttggtggtgggggaagtttcagcagcaagaggaatttgcagcagtagttactccgtatgtagaagctgtccagatgttgaatataagttggatattacgtatatgcttttcattttacaaatggagacataagccctagagaaacttgtcaaaatacatgcaacaggtccgtgtaaacccagatttttccgatactgaactggtacttaggacagttgatttcttgactgatcaaccaaatccatctccatctacttttttcattttccctgatcccttattgcagagtgattctatgttagttttagtattgcttgatgctgcccacgcctgctcttaggctcctgttgaatatgtgcacttatgtgtgaccttgttcttgtgttgtgccgatcactaccagtttacatcacttgtctatcctctttgctttcaaaattgtttggcatattgcctctcagcatttcttttcattttaaatttcaaaatggcatcttttatatttttttccttgattgccatgaccaatgtgtattaaacaattggtttatctctttttattgatacataatagatgtacatgttttcagggtacaagtgatattttgatacattcacataatgtgtaataaccaaatcatgataatgctatatccgtcaccttagacatttatcttttctttatgctgggaatatttgaattattctcttctacctattttgagatatatggtagattattatttactatagtcactgtactgatttattgaacactagatcttatttcttctaactgtatttttgtatttttgttttttttttgagacaaggtctcgctgtcatctaggctggagtgcagtggtgtgatctcggctcattgcaacctctgactcctggattcaagcaattctcctgcctcagcctccccagtagctgggattacaggcacgtgccaccatgcctggctaattttttgtatttttagtagagatggggtttcaccgtgttggccaggctgactaactgtatttttgtacccattaatcaacctcatttcttcctccatccgcctacccttcctggcttctagaacaccgatttactctctcttcatgagatccactattttttaactcactaacatttgcagcaacatggatggaattggaggtcattatgttaagtgaaacaattggtttcacttgcatttttgcaagtttaccagattaaagtaggctggccttatagcagcaataccaggtactgtggaatccaagtacccaccacttaggttgacagccttgggccttctttctttgcctgtgtagtgggggcatatgcaagcacaagggcagggtgggggtgtgtagcagagaaagggaacaggtgagggtttaaaaagtgcattttcaagaaatattttaagagaaataaaggaagctgcttaaattttcatgttgcctagaagactttgaaattgggtctagggtaaatttcttctctctgtattcagttcattttggttctgatattttaggaccagaactcatattcctttttaaaaaagaagcactctggctgagcgcggtggctcacgcctgtaatcccaggcctttgagaggccaaggcgggtagatcaccagaggtctggagtttgagaccagcctggccaacaaggcgaaaccccgtctctactaaaatacaaaaattagtggggtgtggtagcacgcgcctatagtcccagctactcgggaagctgaggcaggagagttgcttgcacctaggagacggaggttgcagtgagccaaaatcacgccgctgcactccagcctggacgacagagcgagactctgtctcaaaaaaataaaataaaaagaagcactccgtggtgttgcatagagtgttggtatatattacatatatgaatgagttaactggcccttatcaggaagatggatgggaagtgggttctggaaaccttattctataccacatccttatatatagtcctcagttattgtccctctgtgttctagggcactgtgaggtgaatgctattgtacacgttttatagatgaggaaactaaggctcaggaaatgtaagtatctctcagaaggtcacacaggtaatcactgaaggagctgtgctcaaacctaagtcctacaactggcagagtgtggttgctcccacctgtaatcccagtgctttgggaggctgaggcgagaggattccttgaggccaggagttcacaaccagcctaagcaacatagggagaccttgtctttaaaaaaattaaaaaattagctgggcatggtgttgcatgcctgtagtcccagctacatgggaggctgaggtgggagaatcgcttgaggcgaggagtttgaggttacagtgaaccatgatcttgcctctgcattccagcctgggcaacagagtgagagaccctgtctgtaaagaataaaatgaaataaaagtaactacaccatttccccatgttttcagccatataagtaacatttgtctcttttatttttcttttctctaatttcagaatattttatggaacatgtagttattcactaataaatctagtggctcaaaactaaaagagattgagtatctgggatataactatcactatattcactgggaaaaggtttcacaagggatgtcaggtagggatttggtggggagaagaggctgttctttggcttttcatgaaaatacagttgcctgtatttctgtactgaggccttgtcagtggcttcagagtcaccccaaggctccaagtcttagccttgcattcctcagaagcaaaaagactttaagtacgctggagtgggagctgtgacagtggcttagatgattgggaattgccttttcccatcttaaggccaggaagcaaacagtgtaacatttcacagctgacttttaatttttaatgaatgtgtttggcttctgactttgttagcaaacaaatacatcttaacttgtcttatgagttctagactctggaatctagagcaaaggaaaagtgctttaagaaacatgaaatattaacttggtgccattttaaatcttatataacttagatcttattggagttcctttatgaaaactgtaacctaaaatggatataccacatgttaagaaaccccatttacatcagtttagggttttcattttgtgtttgacgtgacactctcccacatgaaacaagtgtgcgaatcatttttgtgtttattagatacatggcggaccaactatgtaaatccatctaggaatgtgaagggactaaatatctttttagaaggtaaatcggagcttgtgatagcaataaggtattgggataaaatttcaggcggagagcaccacctggtggtaataaggagaatgtgagccttctgttgcagtatttgcgatagtaaataagtgatatctttgtcaaaaaattacattcttatttgtaataatcatgaattcaaatttctaaaactaattttctgccacacaattctagcattccttcattaaaactgctgtcaaaaccttcaggctggccaggcacaatggctcacacctgtaatcccagcacttcgggaggccaaagtgggagaattgtttgaggacaggagttcaagaccagcctgggcaacatagtgagacctagtctctacagtaaataaaaatattagccaggcagggtggcacacgcctatagtcccagctactccagaggctgaggcaggaggatcgcttgagcccaggaagacgaggctgcagtgagctatgatcgtgccacagcactccctgtccgggtgacagcgagactgcctctaaaaataaaaattaaaaaattaaaaacctgctagctaaccaaataattgtctgtgtcctaaagaactgaagtcttgtgctcgttgtcgttccaagcgtaggccctgtttatctctgtagaaaatcagtgtcttttcacctctttattgcatcctctaatttttatatcacacttattttatgtggtaaatttctgccaagtgggataatggagaaggaagtatttctgattttttagtaagtttttggcaggtttcatataagtcatttttctttcctgggtaaaaattatgaagaggagtatgataatttttcagagtgattattaggatgagtaacgctggcaggggatgggagattctgtaacagttttgaattaaaattcatatttgagatttcttttttgttgctataagcatctttattatttggcaatcttgaaacaagatacttcagtagttgagtaaagtaggaacatcagcctaaggggaaaagatcctattaagttaatgcgaatgcatattttataggcctggggttggggggaagataaacacagtttcaattacaggttgagccatggacaagcatgccatatctatcttttttcctggtaggaaaaccgaatacaggccaccactaaaaagtggtgaatacaggcccatcaccactaaaacgtctcttgggagaggactgtttatgtaaggtgctcggccaaatagaatatgacatggctttgcactcctgggatttttcttaatataagtaacagtcttataacatctgcgtttcaacactcatattagcagacactgtaaaaaaattgtaccatgcacaaatgcccacttattatataattctttttatattaaatgcccagaattggcaatccatagagataaaaagtagattcatagttgccaggggctgggaggaagagctgggagaaaatgggtagtgcctgctaatgggtttgtgatttcttttggactaatgaaaatgttctggaattagatagtagtaatcattgcacaactatgtgaatatattaaaaaccactgtattgtacacttaaatttaaactaaagaaaagctgacacatggaggaatgagcagagtcaataaacaggtggttatggtaaaaattatttcacttatgttctagcagaaatgtctgataatctaatattgtagtttaggccttgaatgttgtaatttgtactttattgccctgttcctgactttcacagggccgcgatgggcctcttggaacattggtgtgttcatctgcattcgatgtgctggaatccacaggaatctgggggtgcacatatccagggtaaagtcagttaacctcgaccagtggactcaagaacagattcaggtacttagcccaagagtgagtcagctgcttccatatatctatgtaaaaggaattccagatgaatttcagtcaaacctggcataaaggtgaagataaaggaaaatttagttgttaaacacttaacatcagattcttgtaccctaacagaaatttttattctttctatttaagatacaagttattctacctatattttacctccttaaaaacagaaatagtctacggtctaggattccatgggcccacgaaagtattaagagggatctttgggtgattttctaagactcttagcatttgcaggtctaaaatttatagtttcaaatattcacttttggtcgggcacggtggctcatgcctgtaatcccagcactttgtaaggccgaggtgggtggatctcttgagtctaggagttcaagaccagcctgggcaacagagtgagacacctgtctctacaaaataaagaattaaaaaattagctgggcctggtggtacgtacctgtaatcccagcagtttgggaagctgaggtgggaggattgcttgagcccagaagttgaagctgcggttagtcatgatcatgccattgcactctagcctgagcaatagagtgagaccctgtctcaaaaaaataaataaataaaaattcactttttaaaaaaacctccaaatcatagacttatgggaaaattttattactaaaatgcatacatgaatcttttttttaagacagagaaaatattttaatggtacataatattaaaatgtatccatttttgtaaactcatcatttctgatatttttagacacatacaaatgtggaattagataacatttaaaatttcaaaaattttaaataaatttaaacataattaaccttaaaagtatattaaataggacaatgtgtatattagatttattgttatcatctttaaaaagctgtaacagctggaatgcatacatgaatcttgcatgctgttagcttggtgggcttggagtgagactcctaagttaatgagtctggctggcctaagagctgtaccttgatatagcttcattattttttattctcttcctacattgaaacgctttaatttcaattttttctttcttgggagtaaaagggaagccccccgccccccaaatccagttgctaaagttggtaatggaaatcagaggttacgcttaaccagaaaatggctttagaaattgctttagattgtatttatagatgtattaaaggtctaaaaaggtgagttacatttttcagttacacttcactctgttttatgaaggaaattatatgccatggagatagtcgggaatttggagatttaaaaagctcttgggatttatccctcacaagtgttaaggagtctacttaaaagcctaatgggaaacacatttattggaattgattaatagtataaactcagaatgataacactgatcattgcctgccaagtagacattttaattggtagctgtgtatctaagagtttcaaatgagatcttgatttattactgaattgaatgtatcttggtacacaaatatttcagtaaaaggaacctatggagtgggggaaagacagcttggggcaaatgattgggaaatcctagtaaggtagagggaatcatgaattggaaatcagaatacacaagtttaaatgttggttctgacactctctaggttggttcttcaattgtacagtagtggaattgggtgagaagtttttcagttctttcttgatctgacgttccatgtttctacattctctttggtcacagtgcatgcaagagatgggaaatggaaaggcaaaccgactttatgaagcctatcttcctgagacctttcggcgacctcagatagacccgtatcttttctggagcaacttagaaggctgagtggtattttgatgcttggggagagtcagacaagactccagtcctgtaatgtgactgggtcatctctatgtggattagtcagtgtccttgcttgtcctctgtcctgcaatcaaggtgcacaaaaagcacatgtatttgtgaatgtcggaattgtcatacggtgtcacttgaagaagactcactctggaattaagactgcagtgatttcactgtgaattcttctataaagttacatctccactagtttattttggatctctgaaactattgtttgattaaaaagagtagttcattgtgctctgttaaccctggcagtcagcaaaattgccattcatttttatcatctttttatgtcttgggtgaaagaattaactgttgtttaccagtttgtcaataaccaataactttcttccaccatctgttcaacagagcatagcacctaggacacaaaaccaaatcccttaaaggcagtgcttctcaaaatgtagtttgtagatcatcttgttaaggttcttttttttttaatgggttcaggtggaacctgttaaatgcagatttggggccttgcagaagacccactggtcagaatttggcagtggggcacaagagtttatgtttttaaggggcacttacgtgcctttgtttgaggcctattgacctaagtgctttaaaatagacatttgactgctttacctatattctagaacagccacatacagcctctaatgtcagtttgaaggttaattccacttgctgctatcatcacgctgaagggaaagcataggaagtaatgattccctgctttaactgtgaaagaggcattttaaggttttggtcagagaaattgcatatgaagaggcaggagccatgtggggaaaccaggcaagagggaaggaggagaacaatgctccgtggaacacaattgatcttttatcttcttgctgtttgagaggcttgttggattcatccttaataagctttttgcagagctgttgaaggatttattcgagacaaatatgagaagaagaaatacatggaccgaagtctggacatcaatgcctttagggttggttatacatctttcaagttttgtccacaataagtaatgtgcttattaaatcaggccagagaacacgttgaagaactgctaccaaaacactccaaaaccatcttttaaaaaatgcaaaagtagaccaggtgtggtggctcatcccctaatcccatcactttgggaggctgaggtgggaggatcacttgaacctagaagtttaagaccagcctgggcaacaaagaaagacccccatctctacaaaaaatttaaaaattagccaggcatggtggtatacatgcctgtaataaccagctacttgggaggctgaggtgggaggattacgtgagccagggaggttgaggctgcagtgagctgtgattgcaccacttcattccagtctaggcaacggagtttgaccctgtctcaatataaatttttaagcaaaagtaaaaagtgccagttactgagtcaagaccatgaggcagaaacaaacttctgcctatcggtgaattcttgccttaatctgtagttagaaggtgttagtgatgattcccagttttgaattatttcttgggatggacatgttgcatatactagatcaaataaaacagtatatgtgtatatgtactacagctatatctatctacatagatatatacacacatatatacttttttcctgtaaatgaaatcaacaaaagtaggtgtaattaaatcaccagagtttccttcagtttgaccaatgtatatttccagcattacctgctgataaccagtgtgttggactgattgccaatgggacccttgtttctgagaagggtttcagagggagactggctaccagttgccaagaacacattccatcctaggcatgtttagaatctgcaatacagtatatgataactaggacaaatataacacacagggggacagacagcatgatttctgaaagaggaaaatatgcctaactaatgacagctaatggagaaccaatagatatgactatttagacctttaaataacctttgacaagattctacagaaaattctcttaggaataattggctatttatctagtcacagaagtattgagagtaagggattctccacttccagcgcaggtcctacctatctatcatctattctagttatgtaataatgatataatagccagtgaaatcactgtttgcactgagctccaagcccttctgggtaattaaaagttaagctaattggaatccacttcaggctgatcttatgaagctgtgtgaaaggggcattaactggtaggtgaatttcaacacaggcaagtaagtgtaatacatatagttaggtaaaaatgattccttctcaactgtgtatgaaggactcttaccttgcagttatccagaaaagggacttgtcaatatcatatctgtgccaagaaagaacccagtgtgcagctacagcttgcatggcatcatcaaaaacagtttagaacccaagcatacacatttcgttttatttgtagaaaactgtggtctgtctgcccagctctgttcattgtgcctaaagatatgaactcagatgaggtcagaaaagggtatctgagataattcagatgacgaaggagtagagttgctatttgtacacagctattgtggaaacagcagctctgccctcagggtattcatgatttcattgctggtatactgtacccatgaaagcaagcccggttaccggatgtttctcttaggaaggaaataacctcccatttaccaaaaagctatttcagaatttgttatttaatgtacttagatttttttcatattttgtgaagatttttatgccaataattagtatttgctaagtgaagacgtttaatatcaaatgaaaagaaactggctttgttaaaaactattctttttataatggacagataaaacatttttaacttaaatgaaatgtcgtgttaaagacatacactttgtatgaaaaaaacagctgcatgtattgattataaaattattttagagaaaatgaaaattaaagtgaaatatccatacatactctcactatctttgctaataattatcttcttggtgtgttcccctttttttctaaatagtttctttttggaggcataattataatacagttatgtagacttctcatgccttcattccacttaacatatatttctgtgttgcttatatagtgtttataatttttaattgttgcatcatctttcagtgagtagctaaatcactgaaagtaataatttatttaccatttcccttctgtggcataaatgttatttaattttttttagcataaataattctggggtgaacttggtgcatttaacctttttcatattttggactattttcgtaagatacattacaagatatggtatcatctaggtcaaaggatttcaacatttgtctcttcctagttttgccaatatactttccagaatttgtaccattttactctctcttctcagcattgtataagagtactggtttcacttcatccctcccaccattatagaaagatctttctccctgcataaagtgcattttaaattgcattttttatcactggcaagaccaaacatgtttttcatatgtatgctatactctgtattcttaaggttactttgtggttttgttttacatttagatgtttatttgattttaaaacttaatttttgttcttctaatctgtaaacttgaaattaaggtttattttctgactgttaaaaaaatgaatattgagaggacctatgattgaatttatgatatcacaaaggacataagctgagtaagatgaacttattcactagtatactgatatgaggggagacctctcaaagcatgggcaaattaaatttggggcacaggtgggcagcatactggtaaaatgttttagcgtctgtacatagcctcgactgcaaatgtcaacagtcatgagtgggttaggagggcgggcgcctaaggtgtttggaagacgcctcgtacagcattgaggctaatgtggaagaggtcaactctcatgctccacaccaagacaccgccccccaagcttgtcagacacttacgtcagaatcaatagggattggaggtgtccttttcggacacttggaattatgatttatccaactattagtcaccttgggccctgtgttctttgtcttgttaaatcattatagaaagaaaaagatgacaagtggaaaagagggagcgaaccagttccagaaaaaaaattggaacctgttgtttttgagaaggtgaaaatggtaagttgggaagtatttgcactgtatggacagcctcaggtatgtgtatatttgtgaaagggaaagtaggaggtctcgtggtgagtaccattgcaccatcacagctggggctaaagggttctgcatctggattggactgcctgctatcatttctgctctctcgttaccagttgctgcctaaatctgctctgtaagggcttcgctttggggccagatgagaactcaggaaatgcatctgttccatctaagcaagaggcacattccaagccagaatgccaaggctgagggacaccatctgagcagatgctatttccacattagtccttctcttgttagaccttctgtatcccattttctgatttcaatgaagaacagtccagaagtgaggccatattagtccattttaagtgatcccttcttatgttcttgctttgtcatgttgaaacagacacccttctttttccacaggacatattgtgactgtagtagtagaatctctaacataaaaacttggaatcttgggagagaggactttacttactattgcttaaggaagagtcttttatcatcgttctgaatcacattgtctgtggacacaatcactagtgatactggcagagtgaattaggtaatctttaaaccaacctcccttttggtgttaaagtaaaaggttttctaaccactgggagatttgttggctcttggctcttgtaccatcagatacctacctttattcttggcttttcctgggaccaaaaactgctgcttctgttggatcccctgttctgtggttgtcttggtttcagaaagatctgtctctttaggacaccagacaatcacaggcgatatctttgtttttcactttaggtttggtttatgcacttctgcctcctgacttgattctttcacctaatacttcctgagttttgtttctttggtaactctctttgaataacagcagccctacccacaagaacaccgtggctttacagtggagatgggaaaagagttcaaaaccacctgcttatttctttctataacatattttcaccttagccacagaaaaaagaagacccacagctacctcggaaaagctccccgaaatccacagcgcctgtcatggatttgttgggccttggtaagagttggacttttcagcttccatgttcttacaaatgttgataaattctcagtgaccctggaagataggtagagatggggttctccagttttgtcttcattgccaagactgttctctcacattcttcctgatctgttttacatctgagcagttgctctaaggaagtgtttactgtgacacttttcagagcgacagtgtggtgtagtggttaagagcatggcctttggagccagtgtcgctctgtgttacttactgtctgtgtgaccatgggtagtttacttaacctctgaatgttgctttcataatccgtgcagtgagaatgagtctctacttcaaaggtgttgttggaaggattaaatgagataatgcctctaaagctcttagccccatgcctggcacatactgagccctccataaatgttagcagttttgctaaacagcacctttgagcctcatgtcaattccctgtactccactccctgcccccattcctttcatttttcagatgcaacctgtttctgagatggcctgtggtcatttttctccaaacctttgaaatcctgaactagtgattctgccctttcagaaagaaagcctgttgtctgcctttcacagcactgatggttgcactttgtttccatccgcttctgctgattgaggttattggctacttaggcttctaatttctgtacctttccttgctctctgaaaatgaaccctcctccataccttgcccttcaaatagccagaagggagccagccagccccccactgtggtgctgaaatacccttcaggcctgggcgtctgctgccctgtgcctgatagctgggctacaggcttccccagagcactctgggaatgtggggtgaagcctcttttgagaagccccgtccatgctagatggttccagaagtctagatttctaggtccatgagcttatgggccacctttgctttttgtctagaatagaaggaaggcatgggcttaataagcagtgctgcatcttaacttcgatctctctttctagatgctcctgtggcctgctccattgcaaatagtaagaccagcaataccctagagaaggatttagatctgttggcctctgttccatccccttcttcttcgggttccagaaaggtgagtcttgtgggctcctcaggattaaagaacattctgaaatgggtgattttgatatcttaatcatggaaccacgtcatgcttccttggtggagttggactttggttttcttgattcttcattcttcccttaacattgtgtcatttctgtcacagtctaagattgctgttcatgcctttttttctcctgctcaaaaagggtgggccatttgagttgcttctctggaaagtgtgtgatactgtgaaggctgatacttgaggctagctcctcggcctgagttactgccagaaaattgtaggtaggaaagacttgaaacctttaatggctaccattcgtgaaacgcctgctatgtctcaggcacagtgtgaggtggtttttgtatatcattttgtatatttcattaataatttcactccttcaccacaaacctgcaaagtggaaattttacagatgtggagacattagtttgtaaaagttatgtgactagcctgtggttatactagtaaatggctacactggggtctaaactcagttccctctgctgcatcatttgtgggttgttttgtttgtttattcctaccaaatcacatgttttggtgaaaggaaagaattgtaacagagcttaattatcaggtgtgttcagatagttgaatggtaaaaatgttaggaagctattaacttgagccatgaattcttattgcagatgttaggagcagcagagagggaagggagacccttaaagagacccccatgagaaccatttcaattctccccccgccctctttaccctaaggttgtaggttccatgccaactgcagggagtgccggctctgttcctgaaaatctgaacctgtttccggagccagggagcaaatcagaagaaataggcaagaaacagctctctaaagactccattctttcactgtatggatcccagacgcctcaaatgcctactcaaggtagatttcatgggtgtcatggccatgtgccaggtagagacatgagggcttccatgcaggaattatttattgtgacagaggacagttgctttgggggccaggatgtcatacaccaaacaaacctgaacatgaccaacgtatcagcagatggaaattaatgtaactcagagtcatacttctgtggagtctggggtcacaattcggtgaagtctagctcaaggtctggatctggaccctaaagggaaaatggctcggtcagcagcccattggtaagctatagcaggcctcgtagggactctaactactttgctgtgtaaagagcattgtgagtagagtaatcctgagaaattccagctggaaagggttagccagggagagttcgggctgactttatgtttttccctctttaaccaacctgtatgtgtgttttcttggcagcaatgttcatggctcccgctcagatggcatatcccacagcctaccccagcttccccggggttacacctcctaacagcataatggggagcatgatgcctccaccagtaggcatggttgctcagccaggagcttctgggatggttgcccccatggccatgcctgcaggctatatgggtggcatgcaggcatcaatgatgggtgtgccgaatggaatgatgaccacccagcaggctggctacatggcaggcatggcagctatgccccagactgtgtatggggtccagccagctcagcagctgcaatggaaccttactcaggtaagctaccccattttacttgcagcaagagttttgagccttcctcaagtttttctcggtttgtacctctccactatcctttgaatcctttccatgtagatgagataatgtaagagacattgttaggtttgcttttttttttttttttttttcctagaaggtctgtctaaagtcagactttctgaggagttctgggctcctgtagaataagcccaactgcctaaatctgaatctctccacacattctcaaaagcaaaaacaaacacacaaagaaaccctgtacaaacaatgaatgcagatattctcacaacaatctcatttggtagatagaatactgcaaggttcaaatggcatggcaatgggcatataaacaccaaatccagcggagccagcatcacagaggagactgtaaaaagagaagatggagcaggggcctagcaataataccacagataaagtaaccccccagaaggagaaggacctaccctcatcaaagacgtactgagaacaggtctgagatgtggtagattagaactctgtttacttggaggatcaaaaataagagacttcagatatataggagtataggtagtaaccttgggaaagcattgcttctcggggagatgggcatggcctaaaaggaggaggtaccctttagaggactggtggtgaaggaaagaaagacacgagaaatgggaatgagaatcacaaaatcaaatatacaccttcttccctcttccaaaataaccacttcactaataaaagatggtgctcttaatctaagaaatttagtaagcctccccaaaccttcacacctattattgctgattgagaaaaaataagaccttacaaaaatgaaccaaacatggaagctgacatttgtacacaactactacaggaagaaaatagaaaatgaaaatcaaaacatttcacgtaatgaatattctccctcaaaaaacagtcatgaagcagaagaaaattgttacacaatctaccaatctgaattaaatgtccttaaacatttgcagataagacaaaacaccttaaatcagaaattcaaaaacttaaagccaaaatggataaaaaactgcatgctgtgaaatgaaagtttactaaactcagaaaagaaattgaagaaaaagccaaaattttcgtataaagactcaattacaagttagctaaagaacaatagattgagctgaaaatatattcggcattgaggaaaggcatgaaacagctaagagaatgaaaactaaatatagaaagtagtaaaaagaattagatggaaattaatatggaagttaggcaaagaaaacttacatatatttggagatgcccaaagaaataaagacaaaataaataaaatatgggacagtattaatgtgtttaacaccagaaaacattctagaaataaaagacttggatataatatggaaagagcccactgtgtgtctgggaaaattgacccagaacagtcaactttaaaacatatcccagcaaatctacagactttaaagaacattcaaaatgtttaggggtccaaccttttccatacctcctacccacaaaaatctgttacttagaacaaacaaaaaatacccaggttgacatcagacttcctagcagcaaaatacaaaaagaataacaaggagagtagtattttaaagacactcaagtgtatgcaagacacaacaagtattttacaaccaagccagccaagctatccttcaggtatcaaggctgtaaaaaataaatatgcaagaactcagagaatatcacacttacaagactttcctggggaatctaacagaagataagcttcatccacctaagagatgactggggtcattttcatttttggcaaaagaactgatggtgagaattgaatgtttaattgagaatctaagactaaaacaaaggtggtgacaagcgttgcagaatatacattatattctgacaaacaaatacaactgaaaatgaaggaggagggagaaaagttgaataataaatattgtatgggaaagaagtagaaatcgaaggatgcaataagctgacaaaccaaatcacggaagcttgaataaggaaaaaggagaccaaggacattgctaaaaagtattactatgaaggtaatcactagaacaaacacgtgaaatgttctgaataccaagataattttcttcctttctttttttttttttttttgagacaaagtctcactctgtcacccaggctggaatgcagtggcacaatctcggctcactgcaacctccgcctcctgggttcaagtgattcttctgcgtcagcctcccgagtagctgggattacaggcacccgccaccacacccggttaattttttttgtattttttagtagagacggggtttcaccatgttggccaggctagtctcaaactcctgacctcaggtgatccacccaccttggcctcccaaagtgctgggattacaggcatgagccactgcgcccagctgagaatttttaaaaacagactacaaagtgcagcaaatacaataaacacagtaaaaatctaatatgatggagttgagaccaaacataccagtcataccagtaggcaactcttctatcaaaagaaaatgatgttcaaattggctaacaaagcaacactagttttgcactaggtacaaagaaatacaaagtgatttaatgtgaaaaccaagagacaggcaaaggaaccccagagaggtggtatggtgcatgtgtactgcacatgtgcatgtatagctatctttatcagggttatacttatttataagaagtacttttatgtttttgtttctctgtggtccagaataatttatgtagctctggtctttgaaggttttgtggaattcccatgtgaagtttgtgggcactattgctttttttgtagcaaatctttgatacttttctctgtttcttctatggaagtcaattttggaaaactgtatttacctagattttccatttcgccaaggttttcaaatttatcaaaagttatgcctagcagtctcattaatttttttcaaagaaccaggatttcgatttattggtgctacatttttccgttttctacctcaatttccgtaggctttctatgggtttactttgttattttctagctttcatagtggagattttaattcacttattttcattgtttcgtttttatttatataagtaatggaatgctataagtctgatgggaatatgtcagagggacgcatgagccaacttccagtggctctgactggccaaatgtgagacaatttgaacatcaaaaagagtaacaacagtaatggattatgacacactgaatggaaaaaacaaaacaaaaccatgagtccacggtgatattttttaaaaaccaggtgtggaatggagggaggaaaagccttctttacagaagaatgacagtagttgtaaaaagagcaaaggattgacacatttgcaaagaaatgcccttcagattatttattaattataatgaaagaaatatagtcactacctcagccaagtgatcaaacataaaattactgacagaggaacaaagtaatgtcatatgcttcctgatattttgtactaagaaagacatgtgtcacctccatagaatcttgccaaaaatattgaacctcgatccaattatgagaaaacatgagatgaatccaaattgaggggtatgctacaaaataactgtcctgggttcttaaaaatgtcagtgtcaggaagaaatggaaggaagtgttagggaaactggtctagcttaaaggagactacagagatctgaaaatgaaatgccatgtacattagaatatggtgttaatgttaaaattcttgagcgtgttcattgttttgtggttctgttaaagtgttcattcttatgaggtgcctcctgacttaggaatgaaatgtcgtgatagctgcagcttttttttttttttaatctgcaacttttgatactcatcaaaaaaatgtaagtttttttatagggagggagagaaaatatggcaaatgttaacagttggtgaatttaaggaagaagatacatgggttttattgtactattgtttcaacttttatgtcagtttgaaatttactttaaaagttggtacaagaaaataatagtttctcctaaagaaaaataacttatatagaaaatttactaggcttaggaaattcaaggcatttttctccataaagtatttttctgttcactgctaggggccagtctttccatcagattcatgaaggacccccgccccatcctgccccaggccttattccactgactgttttctcccagctccttcccttcttatacactgaagacacattagtcttcccccgcccccgccccgccaccgcctttgttcattctgaacagtccagttcctttttttcccccttgtgcaaacgagcaagcctgctcaagcgctttccctgacactgacagtaatagctgtgctgaagatgaggcgggagcactggggagggggctttcctttcagcttttaggattggccaggcaagttaacaataggccccttctatttaggatgagggactggaaaggaaaaagagaggaactcatgctgattttctgtcgactagatccagatgccaggatgccttctttccctccctgagctttagtctccgtcagcattgcactcccaaaaggtcattcacgtacgtggccttgaaatgatctgactgctaaggtccagggtttactgtccataacagagtttccctttgtctcattctccccatcctggcagagaaagggactctcaccctgccttttgcactaattggcggaatgcccacagcctggtctgaaagtctcctctctccctttcagatgacccagcagatggctgggatgaacttctatggagccaatggcatgatgaactatggacagtcaatgagtggcggaaatggacaggcagcaaatcagactctcagtcctcagatgtggaaataaaaacaaaacacctgtatggctgccattctcttcagccctcgctctcccctttccacagcctccacccctgacccccatcctcttttcctacctctctgtttggtttagaaattgctcaataagtcatttggggtttggcatcctgcccagccacttcccaaacatgaagacctctctgttgctttatgttgtacatgccccatagccatcccaacgtcctccccagtcctctcctggcaccagcaccttagaagttgttggcagaaggcacttaaactgtgggagaagtgtgcacacctttgagtcccttccctcaaggttaaagctcctgtcagactctcagaagggtctgtgggtgttgtatattaggcaaacaggggaaagcttagaggtccttctatatgtgttaataagctgtttctaagtgtttaaatttgaaaagcatcatgttctcatgatttatgggaatgaagcaagtactgaaatcaaattaaatactccctgggtcctgggtcagtttgaccctagccctggggtgaggcaagccccctcctatgaggatgagcaaaaatactactctcttcgccctgagttgctttctggatctggggcttcaggacttgctgcttcagtcagcctttattagcaccaaagactttatgaagatcccacacacagacacacatcccttcccgcctcccccctgccttcagtaggatctggctccgtggctggaggaccaacccctatagtgggaatgcagagcttaacgtgtactgcttgtgtgtgtgcgtgagtgtgtgtgtgtgtatgagtgtgtgttccgcctcccaccctctccccatctgctctgggtatttttgtttttgtttagttttaggtttacaacagagaggaattaatttatcagcagcctaaaactgttgtgtttttcttatggtttaaaaaacgccatgtcattgataactccctttctcccttcccttctcccggtctgctgatcactctttcatgcctgtgtatccagggtgctctgtttccccaccgttcccaggtgtacgaggcagagggccgggacagctttcctctcagtcattgttcaccccacttgaaaattcagacaagaaaactttgcttaaaagatttcatgtgtgggaaccacagttcctggctgcctttctcctgtgtatgtgtaaattccttaataaatattgcagggaaggactgtttgcttggccattactgtgcgtcactcttggaggagggtgcgttacacttaggttttctgttttccaaaggcaattgtttcacttcctgtattttagaaaattctgtacttctcatacccaagggtgaggcccaggctccagcagtcagaaagggggcctctctccactggcatctagagctgtgagctgagagaactccagagatcagcaccttctagagtcacagagcatcagagcggcatgctttccccccacaggtggagaaactgagacacggagaaaggacatggttggcaaatgtccactagagaaccctgggcagaaccggcagtagcctccaagtgtctggatttccagccccttgttctttccctataccatggcaattaagtagtgagttgaaattcctctctgccaagagagcagtagctttggctggtaaaggtaactcacccctctctgagctatcagaactggaccttccgtatcagtgtcaggaattaggacactcaatcctgggggcagtacgaaatacaaaaggccgaagaccatctttagtgcatttcctgctccctttgactccttttctgctctcaacaaatgtgatccttggacccttcctcccttctttcctttgagtacaccctttgagtccttaaagatgtaagtgggaggacagcacagtgactaggaaagttggctctgggtcaggctgccagtgttcctatcccttcctacgctgggacctgagcaaattactgaactcctgtgtccaggtaaaatggggacaatggtaatacttaggatagtaagaagcagttcctgtggtatatttagcacactactgggcacttactaagcactcagatattagcaggtattacgtgccagatctgtgttaggcagtagctcatttgacaaacatttaataagtgtcagtaatgtgccaaagaatgttttaggctctagagacaaagcagtgaataaaaactgtccaatctcataggatagtgtggtaggagaaatgcataataaacaaatagatttaattcagacagtataagacaaggggagagagtgggcacggggccatttggatggagtggtcaggagaaggttacatttggactgagacctaaataagcagccagtccgtagagatctggaaagagttggaaatagtttgggggcatcagtttgggaatcatgagggtacgggtgttatgtaaagctatgagaccggttgaagtcacttgagaaaatagaagagaactgagtcttggaacccatcagcatttagagtttgggaaggataaatagatgaatctgagatagtttctgcttttaagaagctcatggtctcatggggcagcaaatttataatttctttttttcgttttgtttttgagacagggtctcgctctgtcgcccaagctggagtgcagtggtgtgatcatggctcactgcagccttgacctcctgggcttaagctatcctccaacttcagcctccccaagtagctggggccaaaggcgtgcaccaccacactgggctaattttttttggagagacagggtctccctatgttgcctaagctggtctcaagctcctgggctcaagtgatcctcccacatcgtccccccatagtgctgggattacaggcatgagccactgtgtccggcctgtaatttcctatgcaggtggattatgggagctgaggtgaggggggacttagcccagtcaggaaaacttcctgaagagagtggcacttgagctgagccttaaagggagaagtaacagttaaccagtgaattggtgtggagaagaatattccagacaaatagtgttatgtgaataaagatacagaaacctacaagagcatggaacattttgggaggcacaaacgtatgtctagggtatgatgggagtgtggtgtgctgtgggagaggtggagctggaccaggtcaggggcctttccacaccctatgaaggagtttagcctgaagtatgagtggtggagagacttggtaggtttgcgttttaggtagctcactcttgcatcactgtgaacagcacgtttgaggaagcaagaccagagctagggaaccagagatgggaagagctgacctagggccgtggtggcaggggtaggggagaatggaggggcttagaatagcagttagtgattgatcatgaggcatgtgagatgctaaaaggtgttccacagaaatgctaaactaagcatggaaaagactgttatatcacctcatatctagaatataatatctacatagtaatctctttgaaaagtcctgtagtagacttttttcatagttttctagcacttaccaacacttattttaccacggagtcaatttttctggtatatctaataaccatagaatactatttgtgggaaaagcaaccagaagaatactttaggacaggagtgtcctatcttttggcttccctgggccacattggaagaagaactgtcttgggccacacataaaatactgataaaatgtgatatctgatgagctaaaaaaaaaaaatcgtaatttttttgttgtttgttttgtttgcctgttttgtagagatggagtctcactctgtcacccaggctggctcttggctcactgcaacctctgcctcctgggttcaagcaattctgcctcagcctcccgagtagctgagactacaggtgcatgccgccacacccagctaatttcttttgtattttagtagagacggggtttcaccgtgttgcccaggctgatcttgaactcctgagctcaggtaatccgcccacttcagcctcccaaggtgctaggattacaggtgtgagccaccacccctggccctcataatgttttacgaatttgtgttggtcctcattcaaagccatcctgggccgaatgcggactgtgggccgagggctagacaaggtgctttaggaggtagagttgggaggtgtcagtattggacaagatgtgggatggagagagaggaagcagtcaaatctcccatgtttctagattatgtcaaagaatttacagaaggaagagaagctggcttttctctctaggagggaagaagtagataattaggagtttggttttaggcttgttgaaattggattgcctgtgttatatccaggtctggttgaccagctggaaattggatttaagagtctgaagttcaaggaagaggtcaggctggagaaattaatttgtgagttagcccatggggtggtaattgataccataggagatggataggaatcacatagggtgggtttgtaaaataacagcagtgggctgggacaatttgtggggaaatatttatttttaatagaagctaaggaggaaaggcccaagaaggagaggagatggaacggggatgaggaggaatagtcagaaagttatgcaaaacaaaacaaaactctaggaaagtacaatgtcaaggaaccctaggaactataatatctagaaaaagggatgatcgcaaacatcaaatcagcaggaaaatctagtgagataaggattggtaaaaggactactgaatttagcatttggaaactgtaaacttcagttggagtggtagcgccagaaaccagattatagcgagttgaagggtgaattgaagcagttgtaaagtagagaaacaggctctgtaaaattaaatatacctggtaagatttaagggttacccttaagaatagaaatagagccgggcgcggtggctcactcctgtaatcccagcactttgggaggccgaggcgggcagatcatgaggtcaggagatcgagaagatcctggctaacacggtgaaacacgtctctactaagaatacaaaaaattagccgggcacctgcagttctagctattcgggaggctgaggcaggagaatggcgtgaacccaggaggcggagcttgcagtgagccgagatcacaccactgcactccagcctgggagacagcgagactccgtctcaaaaaataaataaataaataaaaattaaaaaaaaaaaagaatagaaatagagtatgtaaattccaaatcaataaagaggaaaaaattagaataagaaaatgcaaataagcaaaaatatcaaccatcctcctatcccccaagaaaaaggcagggttaagaatttatttgttttaaaaaaaaaaagctcagaaaagtggaccaaacttaactgaaaagtcatatgattgaaacaagtctaaatacaaaaaatacaatgtagatggaataaatagagttggattactgacattgtcagattgccgtgtgtggtggtcacgcctgtaatcccagcattttgggagaccgaggcgggtggatcatgaagtcagaggtttgagatcatcctggccaagatggtgaaaccccgtctctactaaaaatacaaaaattagccaggtgtggtggcaggtacctgtagtcccagctactcgggaggctgagacaggagaattgctggaacccgggagacggaggttgcagtgagccaagatcacgccattgcactccagcctgggcaacaagagcgaaactacttcataaataaataaataaatgtaaacacataaaaaaggtcgggtctgtaatcccagcactttgggaggccgaggcaggcagatcacaaggtcaagagattgagaacatcctggctatgtccaacatggtgaaaccccatctctacaaaaattatgaaaattagctgggcgcgatggtgcgctcctgtagtcccagctactcaggatgctgaggcaggagaatcgcttgaacctgggaggcggaggttgcagtgagctgatatcaccccactgcactccggcctggtgaaaaaaagaaggctgggcacggtggctcaaacctgtaatcccagcactttgggaggcagaggcaggcagatcatgaggtcgagagatccagaccatgctggccaacatggtgaaaccctgttgggtttccaagattgtcatggctagtctaggtcctttgtatttccatacacattttggaatcggcttttctttttacttttttttttttttgagacacaaaaatttttttgagactctgtctcataaaaaaacacaaaaattagctggacggggtggcgtgtgcctgtagtcccagttactcgggaggctgaggcaggagaatcacttgaacctgggaagcagaggttgcagtgagccaagatctcgccactgcactccagcctgggtgacagagtgagactctgtctccaaataaaatacaataataaaataaaatgaaacaaaatccattcctagcagggtgcagtggttcacatctgtaatcccagcactttgggggggctgaggcaggccgatcacttgagtcttaggagtttgagaccagcctgggcatcgtggcgaaaactgttctctacagaaaattagctgagtgtggtagcatgtgcctgtggtcccagctccttgggaggctaaggtgggaggattgcttgagcccagaggtcgaggctgcagtgagccaagatctccccactgcattccgacctgagtgacagagtgagaccctatctcaaataaaataaaataaaatagaatagaataaaatccattccttctggcatctcagacttttctttaagatcactttccttcacctgaagtatatcctttggaagtttctttagtgaaggtctctttgagtcattcctgaagtactaaaaatacaagaataggaaatgtttaaaatataagaatggaacaaggaagatcaggcaaatgctaaccaaaagtaaatggggatcctttatatcatttatatttatattttcaaaatagactttcagacaaaaagcattacaggttgagcatcttagcctgaaaatgcaaaatccgaaatgctcaaaatatcagcactgacacgacaccacaagtgaaaaataccacaactgacctcatgtgatggggtcacaatcaaaactttgtttcatgcacaaaattatttaaaacattgtataaaattaccttcagtctattagtatagggtgtatatgaaataaatgaattttatatttagacttgggtcctgttcccaagatatctcattatgtttatataaatattcctaaatgtgaaaaaatccaaaatctgaaacactctggttccaagcattttggataaggggtactcaccctgtaatagaaagaggacagaactatatgttataataaaaggttcatttcacaaggaaaatattaccattctaaaccagtatacattcttaaagcctcaaagtacaaatttatagaacttcatggaaaaagaatccatcatcagtgtgtgaaaattctccaccaatttgtgtgtgtgtgtgtgtgtgtgtgtatgttcgtatgtgtgtgtggaaattgaaaagctgattccttgctgggtgcagtggctcacatctgtaatcccagcactttgggaggccaaggcaggcagatcacgaggtcaggagttcgagaccagtctggccaacatactgaaaccctgtctctaccaaaaatacaaaaaattagccgggtgtggtggtgtgtgcatgtaatcccagctactcaggcgcctgaggcaggagaatcgcgtgaacccgggaggcggaggttgcagtgagctgagatagtgccactgcactccagcctgggcaacagaacaagactctgtctcaaaaaaaaaaaaaaaaaaaagaaaaaaagctgattacaaaacgtatatggaaatacaaaggacccagactagccatgacaatcttggaaaaagaaagaaaaaatttgggccaggcatggtggctcacacctgtaatcccagcactttgggaggctgaggcgggtggttcacctgaggtcaggagttcaagaccaggctgaccaacatggagaaaccccatctctactaaaaatacaaaattagctgggcgtggtggcacatgcctgtaatcccagctactcgggaggctgaggcaggagaatggcttgaacctgggagatggaggttgtggtgagccaagatgttgccattgcactccagcctgggcaacaagagtgaaactccatctcaaaataaataaataaataaataaataaataaatttgaagggattacactaccagattttaagatttcttatgcaactacagtaattaagacagtgtggaatcagtgcaggatagacatataaaccgctggaatagaacacaggagctggaaacagccccaggcacatattgatttatgaaggtggcaatgcaatgcagtggattaagggtagtcttttaaagaacggacactgggacgttagagaaaaagtgaaagttgacccctacctcataccataacagtaaatgaattctaggccgggcacagtggctcacgcctgtaatcgcagcactctgggagtccaaggaaggtggatcacttgaagccaggaattagagaccagcctggccaacatggtgaaaccatgtctctactaaaaatacaaaaattagccaggcgtggtagcacgtgcctgttatcccggctactcaggaagctgaggcaaaaggatcgtttgtacccaggaagcagaggttgcagtgagctgagatcatgccactgcactccagcctgggcaagacagcgagactccatctcaataaatcaataaaatacataaataaataaattctacatagattgaagatctagtgtgaaacttaaaaaaattaagctcctaaaagataatagtagagaatatcttcatgtccatgtggagaagccttaggagttaaaaagcactaatcataaaggaaagattgataaagttgattagattaaaattaagaactatttatgattccattaagagagcagaaaggcttgccacagagtaagataagatatttgaaatgcatatgataaaggcattgtatccagaatatatgaagaatgccagcaaaataagaaaaagacatattagaaaaatatgcaacggagaccagaataagcacttcaagcagactaactatgaagactaactttgaagaatgactaacattgaagaaatgctgaatctcattagtagttggggaaattaaaacaaaacaaaacaaaacaaaacaaaacaggagacatcatgaaatacctaccagaatggctaaaataaaagatcattctaagtgttgacaagaatgtggagcaacagaaactagtaggagtgtaaattgacatgactacttggagaatggtttaatagtatcatttgctagatagacaaacctatgacccaacaattctactcataggtatataccaaatggaaatatatgtacttgagcattaaaagatatgcacaagaatgttctggaagcattcataatagctccaaactggaaacaatccaaatgcccatcagcaggaaaatgcatagattgtagtatattcctacaatagaatactacacagcaatgggaatgatcaaactacagtttgccaggcgcggtggctaaacataggacattaaatccaaaatctgtggtaggtgcattcatatcagtaaataccaccagaccttaaatgacatctttcccttcttgattgaacactcaatattttcctaagaattcctcatgtttttttcgatgactgtgtaagtctcctcctctgtgtgcttcctctttgcttcctagtgtgatatgttatacccaaaataaactgagacattcttaacaaaaatatttaacctcaacctaatcaagtttctagatgtaacttccagcttctaggaagattaaaaaacattttttttttttttttgagacagagtcttgctctgtggcccaggctggaagtgcagtggggcaatctcagttcttacaacctctgcctcccgggttcaagcaattctcctgcctcagcctcctgagtagctggtactacaggcttccgccaccacgcctggctaatttttgtatttttagtagagaccaggtttcaccatgttggccaggctggtctcaaactcctgacctcaagcaatccacccacctcagccttccaaagtgctgggattacaggcatgagccaccgcacccagcctgcacccttaaattttatatcacctaaaatctgtccattttcaattttgccatttatcccaagaaagtcttttgatgcttttctttttaaaccaagatacagtctagctttatgcattgcatttggttattatgtctatttggtttcctttagtttggaacagtgcctctcactttttttttttttctcgtgagaatgactttttgaagggctcaagccaattagttggtagacagttctatgtttttaatcttcctagaagctggaagttaggtctagaaacttgattaggttgaagttaaatatttttctcaagaatgtatcagtttattttgggtacatcatatcacactaggaagcaaacaggaagcacacagaggaggagacttatgcagtcatcagaaaaaacatgaggaattcttatgaaaatactgagtgttcaatcgagaagagaaaggtgtcatttaaggtctggctgtatttattgatacgaatgcacctaccacagattttggatttcatgtcctatgtttagcagctgggcatgtttttcatagggaaagctgaacataatattggcctatctattctaaaagctgagatgacagaaatgcctttgtgtaatgtggagaaaggaatttaagaagaattctggaacaaattaccaaatatgttatcccttttcccaacccatccctgcctggcaggatcctgaagacattccctttaccaaagtcttgaagcatactttattcacaagagtactgggagcattacaacatgacttagtagttcataaaatgttggtgaagtgtatttccttgtctcttttttttttgagacagagtctcactctgtctcagtctgtcaccc

SEQ ID NO: 912 - DNA, 2775 bp, Homo sapiens
ggaagagctgccggaagtaggcggtggaggtggtagcggagctgacggcagctgccagggaaaccgaggcgcgggacgcaaggccagcagacaggccggccagagggtcatctgcgtccggcacccaggaggctcgtggtccgcctttgcctgggctgagggtctctggccccgcagcctctcttggaggcgggcctgtccctaagcccgccaaggggcgccgcgcccgaggggctgcggagtgggggacggacgcccccgacccgggaaggggcgtccggcggggccggaggagagggctctccccgctcaggaggtgcccctgggcgggggaccgggagtcctcaaccccggactgaggcaggggtctctgggggcgaggagggcgcgtcgccctctgcccccgccggcaccctggccatgacaggcaagtcggtgaaggacgtggatcggtaccaggctgtcctggccaacctgctgctggaggaggataacaagttttgtgcagattgccagtctaaagggccgcgatgggcctcttggaacattggtgtgttcatctgcattcgatgtgctggaatccacaggaatctgggggtgcacatatccagggtaaagtcagttaacctcgaccagtggactcaagaacagattcagaaagaaaaagatgacaagtggaaaagagggagcgaaccagttccagaaaaaaaattggaacctgttgtttttgagaaggtgaaaatgccacagaaaaaagaagacccacagctacctcggaaaagctccccgaaatccacagcgcctgtcatggatttgttgggccttgatgctcctgtggcctgctccattgcaaatagtaagaccagcaataccctagagaaggatttagatctgttggcctctgttccatccccttcttcttcgggttccagaaaggttgtaggttccatgccaactgcagggagtgccggctctgttcctgaaaatctgaacctgtttccggagccagggagcaaatcagaagaaataggcaagaaacagctctctaaagactccattctttcactgtatggatcccagacgcctcaaatgcctactcaagcaatgttcatggctcccgctcagatggcatatcccacagcctaccccagcttccccggggttacacctcctaacagcataatggggagcatgatgcctccaccagtaggcatggttgctcagccaggagcttctgggatggttgcccccatggccatgcctgcaggctatatgggtggcatgcaggcatcaatgatgggtgtgccgaatggaatgatgaccacccagcaggctggctacatggcaggcatggcagctatgccccagactgtgtatggggtccagccagctcagcagctgcaatggaaccttactcagatgacccagcagatggctgggatgaacttctatggagccaatggcatgatgaactatggacagtcaatgagtggcggaaatggacaggcagcaaatcagactctcagtcctcagatgtggaaataaaaacaaaacacctgtatggctgccattctcttcagccctcgctctcccctttccacagcctccacccctgacccccatcctcttttcctacctctctgtttggtttagaaattgctcaataagtcatttggggtttggcatcctgcccagccacttcccaaacatgaagacctctctgttgctttatgttgtacatgccccatagccatcccaacgtcctccccagtcctctcctggcaccagcaccttagaagttgttggcagaaggcacttaaactgtgggagaagtgtgcacacctttgagtcccttccctcaaggttaaagctcctgtcagactctcagaagggtctgtgggtgttgtatattaggcaaacaggggaaagcttagaggtccttctatatgtgttaataagctgtttctaagtgtttaaatttgaaaagcatcatgttctcatgatttatgggaatgaagcaagtactgaaatcaaattaaatactccctgggtcctgggtcagtttgaccctagccctggggtgaggcaagccccctcctatgaggatgagcaaaaatactactctcttcgccctgagttgctttctggatctggggcttcaggacttgctgcttcagtcagcctttattagcaccaaagactttatgaagatcccacacacagacacacatcccttcccgcctcccccctgccttcagtaggatctggctccgtggctggaggaccaacccctatagtgggaatgcagagcttaacgtgtactgcttgtgtgtgtgcgtgagtgtgtgtgtgtgtatgagtgtgtgttccgcctcccaccctctccccatctgctctgggtatttttgtttttgtttagttttaggtttacaacagagaggaattaatttatcagcagcctaaaactgttgtgtttttcttatggtttaaaaaacgccatgtcattgataactccctttctcccttcccttctcccggtctgctgatcactctttcatgcctgtgtatccagggtgctctgtttccccaccgttcccaggtgtacgaggcagagggccgggacagctttcctctcagtcattgttcaccccacttgaaaattcagacaagaaaactttgcttaaaagatttcatgtgtgggaaccacagttcctggctgcctttctcctgtgtatgtgtaaattccttaataaatattgcagggaaggactgttt

SEQ ID NO: 913 - protein, 372 aa, Homo sapiens
MTGKSVKDVDRYQAVLANLLLEEDNKFCADCQSKGPRWASWNIGVFICIRCAGIHRNLGVHRVKSVNLDQWTQEQIQKEKDDKWKRGSEPVPEKKLEPVVFEKVKMPQKKEDPQLPRKSSPKSTAPVMDLLGLDAPVACSIANSKTSNTLEKDLDLLASVPSPSSSGSRKVVGSMPTAGSAGSVPENLNLFPEPGSKSEEIGKKQLSKDSILSLYGSQTPQMPTQAMFMAPAQMAYPTAYPSFPGVTPPNSIMGSMMPPPVGMVAQPGASGMVAPMAMPAGYMGGMQASMMGVPNGMMTTQQAGYMAGMAAMPQTVYGVQPAQQLQWNLTQMTQQMAGMNFYGANGMMNYGQSMSGGNGQAANQTLSPQMWK

SEQ ID NO: 914 - DNA, 2874 bp, Homo sapiens
aaccgaggcgcgggacgcaaggccagcagacaggccggccagagggtcatctgcgtccggcacccaggaggctcgtggtccgcctttgcctgggctgagggtctctggccccgcagcctctcttggaggcgggcctgtccctaagcccgccaaggggcgccgcgcccgaggggctgcggagtgggggacggacgcccccgacccgggaaggggcgtccggcggggccggaggagagggctctccccgctcaggaggtgcccctgggcgggggaccgggagtcctcaaccccggactgaggcaggggtctctgggggcgaggagggcgcgtcgccctctgcccccgccggcaccctggccatgacaggcaagtcggtgaaggacgtggatcggtaccaggctgtcctggccaacctgctgctggaggaggataacaagttttgtgcagattgccagtctaaagggccgcgatgggcctcttggaacattggtgtgttcatctgcattcgatgtgctggaatccacaggaatctgggggtgcacatatccagggtaaagtcagttaacctcgaccagtggactcaagaacagattcagtgcatgcaagagatgggaaatggaaaggcaaaccgactttatgaagcctatcttcctgagacctttcggcgacctcagatagacccagctgttgaaggatttattcgagacaaatatgagaagaagaaatacatggaccgaagtctggacatcaatgcctttaggaaagaaaaagatgacaagtggaaaagagggagcgaaccagttccagaaaaaaaattggaacctgttgtttttgagaaggtgaaaatgccacagaaaaaagaagacccacagctacctcggaaaagctccccgaaatccacagcgcctgtcatggatttgttgggccttgatgctcctgtggcctgctccattgcaaatagtaagaccagcaataccctagagaaggatttagatctgttggcctctgttccatccccttcttcttcgggttccagaaaggttgtaggttccatgccaactgcagggagtgccggctctgttcctgaaaatctgaacctgtttccggagccagggagcaaatcagaagaaataggcaagaaacagctctctaaagactccattctttcactgtatggatcccagacgcctcaaatgcctactcaagcaatgttcatggctcccgctcagatggcatatcccacagcctaccccagcttccccggggttacacctcctaacagcataatggggagcatgatgcctccaccagtaggcatggttgctcagccaggagcttctgggatggttgcccccatggccatgcctgcaggctatatgggtggcatgcaggcatcaatgatgggtgtgccgaatggaatgatgaccacccagcaggctggctacatggcaggcatggcagctatgccccagactgtgtatggggtccagccagctcagcagctgcaatggaaccttactcagatgacccagcagatggctgggatgaacttctatggagccaatggcatgatgaactatggacagtcaatgagtggcggaaatggacaggcagcaaatcagactctcagtcctcagatgtggaaataaaaacaaaacacctgtatggctgccattctcttcagccctcgctctcccctttccacagcctccacccctgacccccatcctcttttcctacctctctgtttggtttagaaattgctcaataagtcatttggggtttggcatcctgcccagccacttcccaaacatgaagacctctctgttgctttatgttgtacatgccccatagccatcccaacgtcctccccagtcctctcctggcaccagcaccttagaagttgttggcagaaggcacttaaactgtgggagaagtgtgcacacctttgagtcccttccctcaaggttaaagctcctgtcagactctcagaagggtctgtgggtgttgtatattaggcaaacaggggaaagcttagaggtccttctatatgtgttaataagctgtttctaagtgtttaaatttgaaaagcatcatgttctcatgatttatgggaatgaagcaagtactgaaatcaaattaaatactccctgggtcctgggtcagtttgaccctagccctggggtgaggcaagccccctcctatgaggatgagcaaaaatactactctcttcgccctgagttgctttctggatctggggcttcaggacttgctgcttcagtcagcctttattagcaccaaagactttatgaagatcccacacacagacacacatcccttcccgcctcccccctgccttcagtaggatctggctccgtggctggaggaccaacccctatagtgggaatgcagagcttaacgtgtactgcttgtgtgtgtgcgtgagtgtgtgtgtgtgtatgagtgtgtgttccgcctcccaccctctccccatctgctctgggtatttttgtttttgtttagttttaggtttacaacagagaggaattaatttatcagcagcctaaaactgttgtgtttttcttatggtttaaaaaacgccatgtcattgataactccctttctcccttcccttctcccggtctgctgatcactctttcatgcctgtgtatccagggtgctctgtttccccaccgttcccaggtgtacgaggcagagggccgggacagctttcctctcagtcattgttcaccccacttgaaaattcagacaagaaaactttgcttaaaagatttcatgtgtgggaaccacagttcctggctgcctttctcctgtgtatgtgtaaattccttaataaatattgcagggaaggac

SEQ ID NO: 915 - protein, 427 aa, Homo sapiens
MTGKSVKDVDRYQAVLANLLLEEDNKFCADCQSKGPRWASWNIGVFICIRCAGIHRNLGVHRVKSVNLDQWTQEQIQCMQEMGNGKANRLYEAYLPETFRRPQIDPAVEGFIRDKYEKKKYMDRSLDINAFRKEKDDKWKRGSEPVPEKKLEPVVFEKVKMPQKKEDPQLPRKSSPKSTAPVMDLLGLDAPVACSIANSKTSNTLEKDLDLLASVPSPSSSGSRKVVGSMPTAGSAGSVPENLNLFPEPGSKSEEIGKKQLSKDSILSLYGSQTPQMPTQAMFMAPAQMAYPTAYPSFPGVTPPNSIMGSMMPPPVGMVAQPGASGMVAPMAMPAGYMGGMQASMMGVPNGMMTTQQAGYMAGMAAMPQTVYGVQPAQQLQWNLTQMTQQMAGMNFYGANGMMNYGQSMSGGNGQAANQTLSPQMWK

SEQ ID NO: 916 - DNA, 23367 bp, Mus musculus
  misc_feature (1)...(23367): n = A,T,C or G
nnnnnnnnnnnnnnnnnnnnnnnnnnnnnnnnnnnnnnnnnnnnnnnnnnnnnnnnnnnnnnnnnnnnnnnnnnnnnnnnnnnnnnnnnnnnnnnnnnnnnnnnnnnnnnnnnnnnnnnnnnnnnnnnnnnnnnnnnnnnnnnnnnnnnnnnnnnnnnnnnnnnnnnnnnnnnnnnnnnnnnnnnnnnnnnnnnnnnnnnnnnnnnnnnnnnnnnnnnnnnnnnnnnnnnnnnnnnnnnnnnnnnnnnnnnnnnnnnnnnnnnnnnnnnnnnnnnnnnnnnnnnnnnnnnnnnnnnnnnnnnnnnnnnnnnnnnnnnnnnnnnnnnnnnnnnnnnnnnnnnnnnnnnnnnnnnnnnnnnnnnnnnnnnnnnnnnnnnnnnnnnnnnnnnnnnnnnnnnnnnnnnnnnnnnnnnnnnnnnnnnnnnnnnnnnnnnnnnnnnnnnnnnnnnnnnnnnnnnnnnnnnnnnnnnnnnnnnnnnnnnnnnnnnnnnnnnnnnnnnnnnnnnnnnnnnnnnnnnnnnnnnnnnnnnnnnnnnnnnnnnnnnnnnnnnnnnnnnnnnnnnnnnnnnnnnnnnnnnnnnnnnnnnnnnnnnnnnnnnnnnnnnnnnnnnnnnnnaaatcattagaaaggaaaacacaggaaacactatgacaacttgaggtcctcaagcagctggtccctgggaggggacactgtgggcatgtatgagtgcacacatgtgagaaaagtcacgggagttctctggtaggagggtggggagatgccaaagcgtgacaaaaactttcctacaccctatatggttgaaaggcaacaggaaaaaaaaaaaaaaaaaaaaaaaaccaaccaacccaacttagaaacaagtagctgcctgaagcctaacactgaagtcaaaatttacctggcaaagaaaaaccgaagactgactctgcacagccgagcaccctcccatttaccacaagagataaaaagcaggatctgcgcatgtgaatggagacctgtgggaaagggttagtcccaagtgtccagtgcttcaaagaaggtcactctgcctgctctgaccccaaacaagccatgagccatccacatggaagctgcttttgtgtttatgcatgtgtacatgtatgtacatgtatgtgcacatgtatgtacatgtatgtgcacatgattgtgtatctggatgccagaggtcaaactctggtctcattcctcagatgacgtctaccttgtatttttgaggcagtggcctcttgttggcctagagctggctgacttggctgtctgacaaggcccagatatctatccatcgggattccaactattttgttttaagtctgttctggggaattgaactcagagccttgtgattgtgcggcaaatattttactgagtcagtcatctcaccatcccagtgagctgctttccagactatcaagaggcaacgaatgcagccagactcagaaccctcaatgcctttcttctcccaggggctgccccagccttgctctcaaaggcagtctatgccaatgagcatgcataggcaaagcaggctcaaaataactccaagcacatgccactcccactggcaaaatacaggaataaatgactggggaaagcaaaaggagagaaccccaaacacatccccttgttaatttcaaatggccctatagacaatgtcatttccttcatttagaaagaaactgctccaacatagagtcatagctgacttacagtgtcccaggaaaagccctgtgcattttattccagtgaagggactgtgcagatcacattcaaggccccataccagctagacaagtacccaccactaaaccccaacccaagcccaccttgagcctttggctggagggttcgcatggccgctggtggctaaatgataaagtaatattttctccaagcagtaatcggtgcctgctaaagagaaatccatttgacaggcactttcctttattccttaaaacaaacaaacaaacaagatctcttgtaaccccagctgaccttaagctctctatggaacaatgaatgaccttgaacttctgaggctcctgccttcacctccagagccctgggattacaggtatgcacttccatgaccagtttgtggaaagactgaactccagctcaggacttcctatctgggggcaagcactctgccaactgaaccccactcccaggcctccctcctcaatattgtaagtatttactttaacctggtactgcctataaagccaagcaaaggcagggttaatttttttcattacgagcctgtttccaacattgctccttctacacattttctcttgaagacatctgcaagtctcacgaggccttaaaaagcttagcactaaatctttttagtcacttaatccccaaaatgtccctctttggagataatttcctttatgaaaggaaaccttaacctgaccctagtctccagtcaaacttgctaatgaaaggaaggatctttcctttgtgctccaagtttctgggagaaatgtcttggaaaggggagcattctgtctggtcctagggaagataccagttgccagtggtgttgtctttgtctcccggttacttcagcagtcaagcgatagctgagttagacctagtggatggaaaatgggagaaactggtgccaaacagaaaagaggagctatctagtgatgatttgggtctgcccagcagaggacaggatccccttctgcagtaatgggctgcccatgcctaggcagacatgcccagagacagaaccatccacacagttcgagggacagagctccttctcatatgaaggtgtcgcagatggctctggagacaccttccaaccctctgtctgaggctccataacgacagggggctttcaaggcctggatggaaaaggctattacttgtccttcatcaagcctgcctctcttttgccgtgaaattaaaagtgagaccatcccatatgttatttaaagctccatttccctttacctcacatatgtgagcaatggtggagaaagccgtttgcttggttaattacagctctttactggcaaggaagagagagagcacatgctggggaagggggcaaaatgtaaagatatattaaaataagtcgtatttattgagtacttactttgtgccctatgtgacactaaagattttacatgcatgctatatttaatcttcccaataacccaagaagtaaatgctactgttacatgaatattatgacaaagaaaatagagatagtcatatacattcttgggatctaaactggaaaaccatgtctggtgaatcagttctcaaaaccaagtaagtcctggggttggggatgtgccttagtcaatagtgtgcttgcttagcgcacaaggtcttgcttgagttccatcttcagcaccacaaaaactggtatggcttgcccatcgttccagcgctctagaggattaaaagttcaaggtcatctttgtgctccatgtatacacagagtctgagactaacctaggagacatgagaatccctagctcaaaaaaaaaatatatatatatgcatatatatatgtatatatatacatatataataaaaataaaataaaaagaagcctagatccatcatgctgactgctttctatccgtggtgtaaatctcgtcacggtggcagtttcaggtgtccattgcaatgtgtcggattttggagttacaggagcccaggagctgtgcagagttggaacgttagcacttcactgggctaaccccagcactccctattgtcaaccacacagccacactgcctggtctacagtcctttctctgtggctcctgtttaaagtgaaggaggaagaatgtcccgtgagtgaaagtgaccagccttcaaggcaggtgagaacacaggaaaagcgccaaagaatctgagtcccagagaatttgggaattctcttcagaagcccaagaattagctgtgcaggaaccaaggtgaagaatcaactcaaccttcccaaatgaataattttagtctcaagagagacggggaaattatgcagcagaggtctccctgcaaagagtctaaagccaacagttttcatcttactggagtgtgtgggtgtgttctaacaaccctcagttctcttgcctctagccaacacctcagctgatatgaaggctgagagatctcttatttaaaccaactgcttggttgctttatttcattgccttttgttcttgtagccttttaatcagaaagcagggagtggggttttgttttgttttgttttgctttcctgtctggggatcgggatcagggcgttaggcatgttgacaaacatttaccactgagatatatataccactaggccctgaaataatatttgcttcagttgaaagacttcatatttccacagatcagaggctttacttttgaaatgacccagatgggccaaaagatgggtcagtctgtaaagaactttctgggcaaacatgaagagctgagttcaatgctgcacaacccactaaaacacctgaatgtgacgctacccacttggaatcccaacacagaggacacagagctgggtagacctgaggctggccgtgcagcccaggccaatgagaggccctgtcttaaaaaataagaaatgtcatgggaggctggcttctggccttcacatacacccacgtgcacccacatgaacacacacacacttcccaccccatctttctgatgatagattgctcttgatagactcagcccatgtgtgggggtgatcacggggccgtttctaggagccctgccgctctaccaggggttgctgagttctctttagaaatccactgtccacagggctctaggcacttcctcttgttccacagctgccgcgggacacgggcagtaaattgcgaggttaaggaaaaggaagacaagtcttttccatggagaacagaaacggctccttcaattatttccgaaagtcctgccctccttcccacatttatcacctcacttttgagacttgtttgtccttgggccttgcatccacaaagccagcacagcaacggccatgtggactgaagaaactcaaagaacaattcttccttctggccccagggttagtcaagtaatggttattgcattgctaattgagtggccttttgttcagccaacttaccagggtgactctaaaccgtttctgtttatttgcccgtctagccaattttcttcagataggaaatcttgtcctgctacaaaactttgatgaaaatctgctcataatcccattttattgggggtggagggagacttttcagaaatccaggttgaatttgaagtaaaagtgcttctcagagctggtaatgattttcctaaactggtagaggactgcaaggtggaaggctgccctttatttccagaatcattttcacctgttaagtgttgaaggcagaagctcagacacaggatcccggggtgggggtgggggatggggggcagggggcacgattttccctacttgacatttgatagccctgtctttgcaattcaaccctctgccaggactactcaccccttggaaagcagagtcagtctctctctctctctctctctctctctctctctctctctctctgtgtgtgtgtgtgtgtgtgtgtgtgtgactctctctctctgtctctctctgtcttcatcatttgggaaaacattaactccatctttttattacaccctacaatcattaaaaaaaaaaaaagtctgtgggttttttttttttttcctttcaaaaacaaagccaaaggactccccgggatggatctcaggtggtagaatacatgcctcacatccatgaaacccgggattccatccccattgctacaaacaaggacaagaaaaccctttatattctctctcctttgtgaaggtgcatgtgtgtgtgcatgtttgagctcactcgagcacgtcagggtttgaagagggaattggtgtgtgatggcctacttcggttttagggatagtctctcctgggctgcaccaagagttgcctgtctctctctccagtggtggcattgcaagtatcacctcacatggctgcctttctttctttatttgtttatttctctttctttctttccttctttctttctttctttctttctttcttcttttccttcgttatttctttcttttagcatagattctgggaaaccgagttctacagagcaagcactaactaagtcatctctgaacccttcattaaatcagcctttaatgccgatgcctcctgccatgtaccatcaagataaaggactgtgcataagctttctccccgactaacttggagcctgttttggacagagcagagctttctatcgcatacccagggacgggcgaattaaccagctgcagtgtaagcaacaggaggtggcaggatgcttgcccctgtgccactggctttggaagtatcccccacaaactgtggccaaaactagttattccctgggctaaagccatccttagaacttggggacactgccaaagccctgacagcccctgagcctggcctttgttgccaaagccccaggggaaagctgttaattctttaaatgaaggttcagtaaacaaccaaggagcttggttcgctcagcggtgggctagataggaaaactgctatctgtgcactgtcttccaggagcttggactgtttgggagagaggagtaaggcacatttgcttttaaaaaaaaagttgaatcacgagagatgtcactcaaagcagtatgtaagtaaatgtggaggaagaagcactcagagggttcattgcaaggatcagaaaaagacagtcatggtaatggagtggagagagcctgggctctggagccaggcagactaggtgggcacagatccttaagtgaatacaaggaggggagctagctcctccccctcagcaaacttcagcttccttatcctgaaaaacagacctgcctagtgaggggcttatcccaggttggatgcatgcgtggaacaagctttcaggagacgtttgcaatgttttttctgatgtgcatcacaaagctggggctgcaactaagtaggcagaccgcccatctcatgtgtacataatcctgagttcaatcctagcaccacataaactgggcacggtgttggagacaggagcaccagagattcaaaaatgaactcagctccacggggaacttgaggccagaccgggatacaggaaacccactgccagtggagtaaagcaagagcttccagcaagctgggcaagcactcttaccaacggagctacgctactagtcctcggcatatccaggcacgactgagatcatagactaacacagttttcattcccaccatgtgcagtttctttcataagtatttccccttactaataacaactcttcacaaacacttaccacatccatattcactccgttcgcagatgtactaaatcatctcaactagtctgctcatggcggacacttagggctactcagctattactaactattctattattaacactattgtcagcagcagccccgtgaagagctttgtagcatgactgcagtttcctggggctacatcatgaaaggtagaattactaatctcaaaaggttctggctgcatacaaaatacttttcactgaagctgttcaaacaccacacacacacacacacacacacacacacacacacacacacacacactcctgctactgacaagcgagagacagctggtcttttccaatccagaagccaaatattatctttgaaagggggaaaaaaaatccctctcttttttttctctaattctatagtcaccaaatagcatgtcattgttgttttatctgctttcctccagcaaagagacttcacaggagctaaagagacctgtgcagaagctttcttttgtccaccaataatcaacaaatattaattatgcaaatcattttactcagattgtactctctgtcgttcagggacaggtttgcaagattccctttctcccattttagcctttgggaatgcaggaatttggaggctagacacagctcaccatcctgctgctaccgatcttgaacaccagcgctctcttaatgggtctaatattccggtccacgggctcttctgtctgtcctaactagtttatggaaatatgagcctatgttttagtaatgattggatataattaaaagtgcttgtggaagttcttggcttttaacttagcagtttttgagggtcgcacttcctaatttcatccttagcttttctggatcacataagtgcagggcagaagaggactttgacagcacattttgaaggagagtgcccaggccatacaggaagatggagagaaagagttcccaggctgtaaaacagctccccagcacttccaaccgaaagccttccttagctaaagaaggaggtgcaaatgatagtacagttagtagactgcttgcctagcctacacaaagctctgatttaagccctgtcagcacgaaaattgggcgtggtggcacacaactgtaatcccagtactaggcaggtgacaaacgggatcatcagaaattcatggtcatccttaactactggagcctgagtccagcctgtactacgtaaaactgcctcaaacaaaacaaacaaacaaacaaacaaacaaacaaaaaaggaacgggagaagtggggcggggatggagttgagggcgcagtctgggcctgcctatcctttggtccattccaggagggggtgggggcggtatctgggttgcatagcaacccaagctcctgctgccggatgtctcaccacccccagtgcccccggcattggatcccgcggtctctggctggaggtctggttggttctgaccccacccttttctccctccccgcctagcccaggctcggcgccggtcggatcccgcgcgagtctgggaagcagtctgggcgcccactgcaaccttagcctgtctgagattccctagccatccacgcccccaacccgacctaactagctcttcactaagacttcccatcttagtgttctgcgtgggagacgcgagataggcatgaagcgaaagctctgggctcaggccaggctttgcagtcccaggctgctccatttggtctcttggagctcgtggagcgcccactgactgcgcatgaatcgcggctagcttcccagctgggactccgtaattatctgttaactagatgcatccccctatgtgcttatgaaatgaaaatgaaccagtgtttctgtgcggatttcttaggatgtgattacacaaagtcctcgccgctcaattctttataataaagcacatttcaatcattttacatacacacacacacaaatctcttcacgaaattgttgccactattgtgactttcttcctgggagtatatctgcttctggatgggtccgcaagtgctttctgccacacctgaccctaatgtcattatatgaatatgtagtaacacacacttgcttggaagagttttggtagtaatcactcctgacagctcagagtatagaaccctggcggaggttccaacattgccgcctactggttaggcaggctccaagtcacacacccccatccccagtcttgtctcaagttctccacccgtaaactccaggtctaaaattctatccacgtgggtaggatggatgcgcgacccgcagaaacaccctggctggcatcctgctttccccaactttgagaacattatccggccaggctctggacccatactgacttaaaacacaacagcagtggctcttggacttctgtttgcccgcgccctgcgccccgcccccgccagtctcctcccgccccgtccgaactgcgcatgcgcctccccgggagcgtgtttttataaaagtccggttcgggccagaaacttcaattttgttgcctggtgcagcaggtagcagtgaccctctgaggcgtttggtgctccggtaaccaccacggctgtagagcgagtgttgccatggaaccgatcagtgtgagtgtaagtccacttgcatcctactttgtagtaaacgtgcaaacgtgtgaacttagagctcagcccctttaaggagcgggttgaagcaactagaaccttgaggggtgtcagggtcacaaggaggagcgggaactaatttttttttatgtgtgtgaacatggctatagggggaggaagataggaatatttttgccagtaagttgagtgggacgggttcagatggagctttcctaaggttgctcttgtttccctcccccttgagtcctgcggcgcgcgccgacttgcacgctgtttgcaaacgtcccagttttttgaaaaagggagaagggcttgccctctgtcccaagactcagaccatcgtctggtcctcctgaaaacaggagttttctttgagtttcttacattgtgtgaatttagagactttagtcggcacgcgtaggcactacattctgggtgagcttcgaaccggagcgtcttggagcggttcttggagttaggagtgcggttctgaaattccatagtgcagacagaggagcgcccgtcgtcggcgggaaaagtgagctagtctgccgcgtcgcttgcctagagggggggcacaaactgcggcagccgcggagaaaacgtcgctttgggatggagcagcagcgctttgcgggcatccgacccgccacttccccgcagtggcaaacgaacctcccgaggtcgggcttgcctttaggatcgttcctgagaaagggtcataagtctgtaccatgatgctgctggccatgacggcggttggggacaggagggcatgttgggaccgcacctgggttgtgccgggtcgccggagggatgaacaggtgcaagctcggagactgtttgactgagccccagtgtttaaccgtcggtggtttcctgagccttttgaaaccccctcgcttagggagggttttgttctttggtgattttttttttttcgtttcctccggcggcgcgcaattcaaaggcgctcgctctggagccgcccaatctgtcgctcgcacccggaggaacgatcctggcgcgcagccaggaggaacccctagaaccgctgcgtgttggtcttagacctgggtatggtgggcaacggtgccagcccctaggtgggtgactcggacatcggggtgcgcacggtctggaccactcctgctgcctacctcggactccaataactaactgggtccgctgcaggatgggaagcgaccggaaagtgaggaagtgaaacttgggggcgaaaaccacggggtacagaccccgtgactttccccacccaggacagtgtgactctaacgtcccagatccacccagtgataaacatgggtttggcaagagagacccaccttccagagaagcgccacaatgggtgaagtaggggagtgctatttgctcctttctaacactctgctgagcctaaccccccaaagaccttcactttatccccgctttcttcactacgcatgactcgaaatgtaatagtttgtgttagacagacgtgagaaaaacaaggttttgcgcctaaaaagctaagagtctttgggggacccccaccgtcaagctccgtctttctttctttctttctttctttctttctttctttctttctttctttctttctttctttctttcttcctttcttccttcctttctttctttctttctttctttctttctttctttctttctttctttctttctttctttcctcctttggctaatcctcatacagaaatcccatctccttcaacacagactttaaccccactccgctggataccaccgcacacagttttgagagtgacttctttgtttgaatggaggatttgtttgtttggtttggttgtgggtttttttggcttgggtttttgtttgtttgtttgtttgtttgtttgtttgtggttgggggggctttactttttttcctccgaggtttttttttttttctttcctctcgtgggcggggcaggaaagctattcaagactaagctgtgaagtccttagactctcaacgtccttttgttctaagcaaagactttcctaattggttccactaaagagggcatataacaagtgactggtggaagatggagaacaccattggttgcaggattctgtgttctctctggaccttagccagccctttggagtttcctgggaaaggttgtgttaaaacctgcaatcaatactagctttttaggcaacagaaacacttaaaaattgggaaggcttgctgaccttgaagtgacgttgtctgtccctgtttcctttgcagatatacacttctgataactactctgaagaagtggggtctggagactatgactccaacaaggaaccctgcttccgggatgaaaacgtccatttcaataggatcttcctgcccaccatctacttcatcatcttcttgactggcatagtcggcaatggattggtgatcctggtcatgggttaccagaagaagctaaggagcatgacggacaagtaccggctgcacctgtcagtggctgacctcctctttgtcatcacactccccttctgggcagttgatgccatggctgactggtactttgggaaatttttgtgtaaggctgtccatatcatctacactgtcaacctctacagcagcgttctcatcctggccttcatcagcctggaccggtacctcgctattgtccacgccaccaacagtcaaaggccaaggaaactgctggctgaaaaggcagtctatgtgggcgtctggatcccagccctcctcctgactatacctgacttcatctttgccgacgtcagccagggggacatcagtcagggggatgacaggtacatctgtgaccgcctttaccccgatagcctgtggatggtggtgtttcaattccagcatataatggtgggtctcatcctgcccggcatcgtcatcctctcctgttactgcatcatcatctctaagctgtcacactccaagggccaccagaagcgcaaggccctcaagacgacagtcatcctcatcctagctttctttgcctgctggctgccatattatgtggggatcagcatcgactccttcatccttttgggagtcatcaagcaaggatgtgacttcgagagcattgtgcacaagtggatctccatcacagaggccctcgccttcttccactgttgcctgaaccccatcctctatgccttcctcggggccaagttcaaaagctctgcccagcatgcactcaactccatgagcagaggctccagcctcaagatcctttccaaaggaaagcggggtggacactcttccgtctccacggagtcagaatcctccagttttcactccagctaacccttatgcaaagacttatataatatatatatatatatgataaagaacttttttatgttacacattttccagatataagagactgaccagtcttgtacagtttttttttttttttaattgactgttgggagtttatgttcctctagtttttgtgaggtttgacttaatttatataaatattgttttttgtttgtttcatgtgaatgagcgtctaggcaggacctgtggccaagttcttagtagctgtttatctgtgtgtaggactgtagaactgtagaggaagaaactgaacattccagaatgtgtggtaaattgaataaagctagccgtgatcctcagctgttgctgcataatctcttcattccgaggagcaccccacccccacccccacccccaccccattcttaaattgtttggttatgctgtgtgatggtttgtttggtttttttttgttgttgttgttgtttttttttctgtaaaagatggcacttaaaaccaaagcctgaaatggtggtagaaatgctggggttttttttgtttgtttgttttttcagttttcaagagtagattgacttcagtccctacaaatgtacagtcttgtattacattgttaataaaagtcaatgataaacttaacttggcggtgtgctatgtcatcatttctgctggctcttagtaataacatgtttgggaaagtagaataatgcacacatttatggcttcccggagaccctcctgggtgtgtctgtgtgggctcacatatgtgcacaagcattattcctttggtggtcaacttcagatgttcctcaggacctgtcacaccttgttttgttttgtttgttttggttttgagacagtgtctctcactggcctagaactggattaagtagacaaggctggctagccagcaagctccagtgatctagctgtcttcctcgccagagctgagtgagattaaagcatggaccacgatgcccagctttttatgagcattgtggaaatcagacctaagttttcacgcttataacagcaagcactcaaagaaccaagccatctccccagcccctgtcttaagtcctgtatatttacttaagctttaccttaagaggcagactttctgcttctaccactaagggagcccaggagcagaaagtttaagaaactgcattaaagatgtgggacagcaacagtagtatttcaaagcctgtgtggagagaagttgaagcccttatactttcaactcctcgtggaaggtgaggaaagcaggatacacattcgcatttcactgtagtttcccacctgtcccagtcaggctaggcgctgtgtgtcttctggtgtagatggcaatcccacccccacccctgtccccttttgacaaaggtgggacctgaggctcataaacctgtggtaacttttattttcagcttacacaacccaaacttaacaccgttgatccatcttacccagtattgccaccccaaaacacctggtcagatgccggcagagttgttactgaacatgaggccaaaagtgaatgttttcttcataaaattagccatgcccaaaataccctccttgcaatatcacccatgcaaatctcagcacctttaccctgactcttattacaacatctagtgtctcctgaagggctcaactaaatctgttaaagattagtgctggtgttttttggttggttggggtttttttgtttgtttgttttttgttttgttttgttttttaagagttgaaagctctactgaagcaagctcttcattttgcacaagatttgagagccttatgtaataacccagagctatttacactaacattgtgcaagccgcaaactcttgagtaaattgcaggtccggtctcctggagaccggagaagataacttctcatccatactggtttgcccctcggaacatatacagggtgctgtaggcacacacccaggcagtaagcgatatataattaaggcaatatttggtcttttagtaattgtttctggcacagaaaatccgtttgggaaggaaaaattgcaaggccttatctttcttaggcaaatcacatttgttcaagacaaattatagatcctgtgaagggaaataacttaattacttaaaataaaatctaatttagctgtagggttttgcagcagcctatggatctggggtacttcatgcccgtgttcctattccacttgaggacacaattagattttcagtaggaaattatcttgagatttcttgccttcctctgggaagtcttaattggatcacgcttagacatacttttcgtagttttcgatgtgcacactggaaggcttggtctcgaagctgtggccattgtggcaggcttcactcggaatctgctctataaatatttattcgcagggagacaataggagaaaaccttgggaggaattctttctcttttctcatcttggcttgaaacctcctcaccccagattcctctcctttgccttggacccccaacaaaaggaacttagtctaaaccaaattcccagcactgtcagtctccatggatattgcagcctccctgggaacaaaggcagatagctccttctctaaaaaagaaaagaatttgtaaaaaaaaaaaaaaaaaaagtctttactccctccctcctccaaaaggagactccccagagtcattctctgtcccaactctctcatgacaaactcctccaaagccttccctgtgtcctggttggtctggcaatgtgaggaaacccagtctgcttgccagccctcacatgaagcaactgattgttccttgggctcctcccccatgaatggggctcttgaaggtcagtaatgtagctacaatcgtataatagaagctaaaatatttaaattgtatgcatgctgccaataatggcgtgaacatgacatctgacttacaagtgatgtcaggtctctaactgggcaggaacttgaaatgccactaggtgatctatctttcaggcccatgggcttcccagcctcctttcatgattatatttgtatgaacacatccattccagggtgctcttttagaagaaaatgggctttgttttagtaattgaaccaagtatctatagtttttctcccatctgatattcagatgctaaataaaagctccacaaacagttgggcattattgttccgtgtgatgctcatttaggagaaccaaggacccctggagacaaaattcaaattactacagaaagcagcccagcatccccacaatgctatgcttagaaatgtgctcttacaacctagcatcataagagtgcacacaactatcatggatagcctcttttgttagtcactgctaaagaacttccctagaagccataacaacattcccaagagtacaacctcagaggaacagtagtgttctggggccaaaagtaaagaaaatgaattctttaaatgaaatggtcctggagccatattgccctccaggtcacatactgatagcttctggacatcttctgagtgatcctattgaagagagcaggaaactggagctagaggccagacacattacttcatatcctataatgttcacaaaactatctgcctcaaagaactacctgacccagaatatcaattgtattccaacttcagaaaagcctttttaagggcagtaactctatcagtaaatcactcacaggggagggggtggagacagactgaaccacagcacttgatgggcagatgtcttggttagggttttactgctgtgaacagacaccatgaccaaggcagcatttataaggacaacatttaattggggctggcttacaggttcagaggttcagtctattatcatcaaggtgagaacatggcagcgtccaggcagtcatggtacaggaggagttgagagttctacatcttcatactgacttctagacaggtaggatgagggtcttaaggtccacacccacaatgacacacctactccaacaaggccacacctcctaatagtgccactccctgggacaagcatatataaaccagcatagcagccatttcctacttggtgggttcaggactaggagagaccctttctcaaaataaacaacaaaaaaatgtagatggcatctgaagaatgacagccatggttgtcttctgtcttacacacacacacacacacacacacacacacacacacacacacacgtgcacacatgaatacacatacagacacctgcacagtcatgcacaaatgctcacacacaaacacatgcatgtacacacacacactcacataaagaatccccttttagagttatggtgcttatgaaaataaagatatatataaccagtataatctgtgtttatataaataagtttattctagtgtgtgtgtgtgagagagagagagagagagagagagtaccatggctcgaatgtggaattcagaagacaacttaaaggagttgattgtctcctttcaacatgtgggcccctgggatgaaactcaagcttgccagctaggctacaagtgcctttacccactcagccatgttgccagccccaaaccagaataattccacaaaataacatgaatccatgaaggctcttgaatgatttgctcaaccaaaatccagaatttgaaatcctaccaccttaaggggatggctttgaagtgagacctctgggaagaggcaggtcatagaattcctgatccggagcaggagcggtgccctaggaacctagctagcctcgtagatcacagaggactcagctcaaagcccatcatctgtgaaccacaaagcaggcccttgccacataccgaatctgctagtaccttaatctccactttcccagcctcctgagaaagacgtttctgttgttgctaaggaatccaacctagtatacatgagagtttctgttatggattccaacttcttcctctagccttggctatttgggtttcattccagggcactgtgctccttccctgacattcccttctcacacaggcctagctgtccatcctaacactttgcaacacgtcctggttttcttcttttaagactagctgggaatgatgaggggccagcccattcttccaccaactgccatccatcgattcagagtcttttaaaccaaccctgttaagtcagacaattaannnnnnnnnnnnnnnnnnnnnnnnnnnnnnnnnnnnnnnnnnnnnnnnnnnnnnnnnnnnnnnnnnnnnnnnnnnnnnnnnnnnnnnnnnnnnnnnnnnnnnnnnnnnnnnnnnnnnnnnnnnnnnnnnnnnnnnnnnnnnnnnnnnnnnnnnnnnnnnnnnnnnnnnnnnnnnnnnnnnnnnnnnnnnnnnnnnnnnnnnnnnnnnnnnnnnnnnnnnnnnnnnnnnnnnnnnnnnnnnnnnnnnnnnnnnnnnnnnnnnnnnnnnnnnnnnnnnnnnnnnnnnnnnnnnnnnnnnnnnnnnnnnnnnnnnnnnnnnnnnnnnnnnnnnnnnnnnnnnnnnnnnnnnnnnnnnnnnnnnnnnnnnnnnnnnnnnnnnnnnnnnnnnnnnnnnnnnnnnnnnnnnnnnnnnnnnnnnnnnnnnnnnnnnnnnnnnnnnnnnnnnnnnnnnnnnnnnnnnnnnnnnnnnnnnnnnnnnnnnnnnnnnnnnnnnnnnnnnnnnnnnnnnnnnnnnnnnnnnnnnnnnnnnnnnnnnnnnnnnnnnnnnnnnnnnnnnnnnnnnnnnnnnnnnnnnnnnnnnnnnnnnnnnnnnnnnnnnnnnnnnnnnnnnnnnnnnnnnnnnnnnnnnnnnnnnnnnnntatgttttgagataggttctcatgtagcccagtctagcctcaagcagccaaggctaagctctccctcttaaataatggaattgtatctttgaaccacaatgcccccttgtaatgtgtgctgggaaccatacccaggcttttgtgcatactaggcaagcactgtcctgactgaatcacaccctagccttattaatccaagttaatttaccatttctttccagttctagttgatggcattaatggttaccaccacttaccagtgacatacaccaacgactttgattatttcatctttatagatgaaatccctccacacagtaggtattattaccgttgtatagacagagaagcagaatcatagaacgctgtctaaagctgacccaaagtcacatacttaatacatgctaaaacctggagttagacaaggcagtctaacctgcagcaagcctctcttcactttggggtctggttaattcctttgtgtcattcagtattcaaagaactggccatgaggtcaaataggtattttgtatgactggggggtgtggtgttgagaggggcaaaaggattgggtgttcgagaccagtctgtactacacaagattactgcctcaaaataataaaaacacccaaaaggtcatccattctcttttttatttttcaggtttaaacagtagacatttacctggtcctatttacactttaaaattcattttatttatttatttatttgtacaagtgtcttgcctgtgtctctatctgtgcacaacatacatgtacttccctcagaggccagaatagggtttcagatcccctgagagtatcgtatagacagctgtgagctaccacataggtactgggaattgaactcaggtcctctggaatagcagccagtgttactgctgagcaatctctctagcctccagttttacttttcaaagcaacaaagcagaacgtttagagatttttaaaatttagatttttcactgttgcttcttgtaattgcaatgggtttcaagttagcctagtgcactttgtctggcatatggtcagtgctcagtgatgcgatcgtcaatgaacatagggctgagtacgataggtctccactgtacgggcataccaatctccaggcgcactctgcaattagtgcttgcttgtgtgctccattctctttccctcagtcacctttcccaatcaatcatttatcgggtgctctattattgatcaacactctcaaccaggcaaatgtgaaagctgctcccagcagaaagggtaccctttagcggcctggacatgctggaaagttctctcagggattctcagactgacctgccttcaacattttaagaaaagaagtttccattcagctgtgatggtttatactcattgccaacttgacaaaatctaggatctctaggagacaaatctccagatgatgttacctgagatgggaagatcctacctaaatgtgggcagcaccatcccatgggctgggggcctggacttcataaagcagagaaagtgagttgagcatccatatccatctctctctgcttcctaactgcagatgggccatggtcgatggacagcctcaagctccacgtcttccttaccatgactgactgtatcccctggaactgtgagccaaaataaagccctcctcccttaagctgcttttttgtccaggaatttctgtcatagtaatgaaagaagaagtgaatatatcacttgcctttcaagtttcctactgcagtctgccctctgtatcctagccactagagcataggtatgaagatagtcttctaattctatgaggcctgtatccacagactcaagcaactgtgcgttttaaatatcccaacaggctggtgggatgcaaactgggtaaaggtgatgactgccaagcccagtgctctgagttcaatccccaggatccacttaatggaaggagtcctctgacttccacacatgtgtcacaccacacatgcatatatccatgaagaaatacatttaatagtaagttaaatattcagagaaaaaatgcattcttactgagtattttctgattttttcccttgtgtattcttccaaataatacagcataacagtcatctatatagcatttctattaaatgatgcactacaaggaaccccaaaatgatttacagttgaaaagaagatgtgtgtaggctaaaagtaggtattatatcaatctatatgagagacttgagtatccatggattaggaaacccatggaggatcccgaagccaaactccagttgatacacgagaaagactatcctctcagccttctgctctatgacagagggttggagccaggccagcttgttgggtgcactgagacaagctgatcccagacctgcttcctttctacttagccagtcctggggaagctggtcatgccttgaagataaggagcaggaattgtgccaagtcctgggatgtgggaactagcccctaagcagtgcttcatccctctgttcacaggaggcaacttgttaggaccctctgggactgaagaaggaaatggaggccatcactttgggccacagcccacttccttgaggctctatcagtctgagtaagcttttccatcttcagttcctaacgtatgaagtctgggacttgtgagcaaaagggtttgggaaagtcaaaagcagctattgtgcaagacaccactgttctctctgaaagggaatattacctctcaactaagtttgtgtcctaagtggtaagacctttacagcctgacatggtcaattaatataagaagctttcataatgctgttggctaacctctgctgtcatgacaagaagacatctaccagtgacaaataagtaactgggtatgggcctgctcctacaaaacctcatttatggaagctgaaacttgagtttcatagaattttcttgtcgtaaaatatgtttttcttttcactacttttcgtctttcaaaacaaaaagatacaaaaaccggactgggaagatgatttagtgagtggggtgctttctacacaaacacgagggaaccgaatttgggtctccagctgccacattaaaagtcagaggcaatgacatgtgcctatgattccagccccaggagagacacacagggagatcccttggtttgtgggccagccagtctagctaattggtgagctccaggctctgtgagagaccccagagagatgaagaacagtagaggaagacactcagtgtcaacctctgacctccaagtgctcaggcacagtcagtgtagccacacacgtatgtgcagacacagtgattcattgattgatgtttggttgatatttttaaatattaaaaaccagtccttgatcctaggctctgagcagcaggttctgcacgcaatcatccattgattcctgcttcagatcgtactttaaaaggcaacagaaactcaatacagtcaaacggagaagcagaactataaatataggtgagtttattctttaagttgaagggactcaagatcccctcaaaataatgactttccatgtataaggcactttggttttaggagacagcacagccggtaaagtgtttgccatgtcagcaaatgacctgagtcagaacacacatttaaaaaaaaaaaaaacagttttagtagcatgtatcagtaatccctggaagaagagacaggtagatagatctcttgggcttgatggtaggccagtctaacctacttgatgagtcccagaccagtgacagacttgtgagctcctgaggaatgtcaccgaaagttgacttctggcctccacatatacaggcacatacacaaaccacacacacacacacacatccccctacactcaaacacactggaatgtacacttacacacttctgtgtgtgcacacacacatatacacacacacaaacagaggcacacatatatacatacacacacacacacacactggaatgtacacttactcacttctgtgtgcgcacacacacacatacacacacacacacacacacacacacacacacacacactgaaatgtacacttatacatttatacacttctgtgtgtgggtgtgcacaaatgcttccacagagagaccctcaaggcaggtctgtgaaccagtttgctatgtccgcatgagaagacagttggctctttagccacatctgggcagctacatttctctcatgtcccagagtgctgtt

SEQ ID NO: 917 - DNA, 1080 bp, Mus musculus
atggaaccgatcagtgtgagtatatacacttctgataactactctgaagaagtggggtctggagactatgactccaacaaggaaccctgcttccgggatgaaaacgtccatttcaataggatcttcctgcccaccatctacttcatcatcttcttgactggcatagtcggcaatggattggtgatcctggtcatgggttaccagaagaagctaaggagcatgacggacaagtaccggctgcacctgtcagtggctgacctcctctttgtcatcacactccccttctgggcagttgatgccatggctgactggtactttgggaaatttttgtgtaaggctgtccatatcatctacactgtcaacctctacagcagcgttctcatcctggccttcatcagcctggaccggtacctcgctattgtccacgccaccaacagtcaaaggccaaggaaactgctggctgaaaaggcagtctatgtgggcgtctggatcccagccctcctcctgactatacctgacttcatctttgccgacgtcagccagggggacatcagtcagggggatgacaggtacatctgtgaccgcctttaccccgatagcctgtggatggtggtgtttcaattccagcatataatggtgggtctcatcctgcccggcatcgtcatcctctcctgttactgcatcatcatctctaagctgtcacactccaagggccaccagaagcgcaaggccctcaagacgacagtcatcctcatcctagctttctttgcctgctggctgccatattatgtggggatcagcatcgactccttcatccttttgggagtcatcaagcaaggatgtgacttcgagagcattgtgcacaagtggatctccatcacagaggccctcgccttcttccactgttgcctgaaccccatcctctatgccttcctcggggccaagttcaaaagctctgcccagcatgcactcaactccatgagcagaggctccagcctcaagatcctttccaaaggaaagcggggtggacactcttccgtctccacggagtcagaatcctccagttttcactccagctaa

SEQ ID NO: 918 - protein, 355 aa, Mus musculus
MEPISVSIYTSDNYSEEVGSGDYDSNKEPCFRDENVHFNRIFLPTIYFIIFLTGIVGNGLVILVMGYQKKLRSMTDKYRLHLSVADLLFVITLPFWAVDAMADWYFGKFLCKAVHIIYTVNKSVLILAFISLDRYLAIVHATNSQRPRKLLAEKAVYVGVWIPALLLTIPDFIFADVSQGDISQGDDRYICDRLYPDSLWMVVFQFQHIMVGLILPGIVILSCYCIIISKLSHSKGHQKRKALKTTVILILAFFACWLPYYVGISIDSFILLGVIKQGCDFESIVHKWISITEAFFHCCLNPILYAFLGAKFKSSAQHALNSMSRGSSLKILSKGKRGGHSSVSTESESSSFHSS

SEQ ID NO: 919 - DNA, 23943 bp, Homo sapiens
agtgctgggattacaggtgtgagccactgtgcccagcccaacttttaattaatgtcattctagtttacaaaatagccttatagattaccctagacagttctcacagcattcctgctacatacatagttaatgggattccctgatagctgcctcagagcgtgtggtgagctcctcgtcttacactgctgtctcatttgctgctcactgacatctccattactcccttaacaccaagtcgcgctcagagagacccatctactccagtttccagagtacagcctgctgctttacacgtccaagtctttgcccagatggttccctgggtagaatttttttttcgagtccttcaacctcttcacctccagaagccaggttttctggggagagaaccagagtagcaccacccaagggactctttggggtactcccctgggtggtgggggggggtccatcaccaggcagcctaagcctggcatgctggggctgcctcagcttctatggaaattctggaagatgacacagggggaccagggagattacagggcctgtgctactgcctcgggccggtgaaaaaacagacgcatctgcccccagcgcaccccaccccagcaacacacagaagggagagcttgcacagtaaaacccacttccctcgttagcttgctcgctaggagaagcagaggagagctgtttatacttacaacaaagtgggacagcaggagggtgggagagaaacttcagaccttgtactggctgagtttttcttatttctgattcttagggatgcttcacactcccccattttcagttctttcttctgcagaattaattcaagacagcctgttctgttcacagggggcacaaaggtatgggcccagagactgcagacaacaggtcagaaaaccacagcattctaagattctctctgactgaaggtggggataaaacagattttcaagaagaaaatgaagcatacagtttgaaaaatacagatcaaataacatactttttcacctttggaaaacaacttcatgttttcacaatacaaactattgaaagtaagtagagttcaataaacatctcttgattgttggagaatggtcagaagaaatatcttctgtatatttgtgcttcctagaaagagtctgatgaagtctcctgggacctgctagaaagcaggatcaattaaatgtttaggtttagcataaacaggcacaggaggtctttgtcttctgggaccagggagcccctctcactttcggggccagttgggtgacccgcagcacctgaactcctaggtagaaacctaaagagaaatccatggcagtgcctgagtagaatttcctctttctagaattgagggtgcagaacagcagcaggcaaatgacagaggagagagaaggcaaaacaaaaaattcagcagcgcaagagaactgggctttctagggtggttggttgtgatctcatgtgtgcgtgctcttgtgtgcacacgtgtgtgagaaaagttggcagaggaggctttggttgaaggagggagggtggttctttttttagcctggaaaattgccacactgggacaaaaaccttagcacagcccagatgggcgaaaggcaataggaaaaaaaaagccccctcagaaaggtaaccagctgcctgaaccctaaccctgaagtgaaaatctacctggccaagaacaaaaatcctcttcagtctggagaagcctaatctaaacctgcatgggggcgatgctcgccagtggagctagaatgcctgccatttatcacccaagataaaactctcagcaatcccctcatgcaaatggaaccctgtttgcggaaaggattaatccaaattgttccgcgttgttcaaagtgtctctgtggagttcgttctgtctcgtctgccccaaacaagcaataaattatccacacgtgagccaatttcccaaccaaaaagagacaatgtgggcagaagcggacttttgatgcccactccccgcaaggggctgccccacctgggctcaaaatagcaagcaggtcacggagggcagccctgggcacataggacaggagtaaacacagccaggagattatgctgcagctggttaaccacaaggataaacaagcggacaaagtagggagaaacccaaagcactccacttcagtatttttaaatgacactgaaagcaatttcatggcttccatttaaaaagaagctgctgagacacagaacatccccaatttacaaagattccaggaaacagcctgagcttgtgattggagggggttacgggggtgaacagactacatggaaatgctttctccaggcagccactggcacctgttaaaaagaagcccattcagacacacatcttcagacacatttccaagtattcattttaacctgcttttgcctaacataaaaccaagcaaagatgtggttaattgccttctttattaacctgcttccagagctgctgttaccccacattttctcaccaaggcaagtatatctggaagtctcaggaggccttaaaaaagtccagcactaaatcttctgagtcacttaatccccagctcttctatgtttggagataatttcctttatgaaaagaaactctaacctggccagatacccttctcagacttgctaatggaacaaagaagcctctcattagactcatccctgtggctgcagaaataagtgtctcggaaagcacagcttttgctttagcctcaggatggttttggctgccgcggtccttggcttcctctcatggcgtctcctccagtcaagctctagctaagttacacttagaggctagaaaacaggagagacaggtgcctagccaaaaaaaaaaaaaaggaagaaaaaaaaaggaccgtctagtgatcaggtttgcccggcagtgggatctgctcctttccaaagggtgggctgcccatcccaggagtgtccagagacaggaccacctgctgaaaaggagctccttccaatgcatggaacataatgagaccaaatggcattaaggacccctttcaaccccgaatctgagactgcaaagacaggaagggctttcaaggcacgtatgagaaattctttatgtcttctctttccttccctcattgcatagatctctcttctgaccacaattaaaagtaagaacacttcacactttatttaagactccacttccctttacctcatttcagtgggtaatggtggagaaagccatttgtctggttaagcaaagcccttgaccaacaagaaagacatttcagcagcagagataggaacctatattagtaataggttatgtttattaagcacttactaagtgccccacactgtactaaagtctttacatagatatcatattaatcttcccaataatccaaaaagtagaatgttattgttagccggatattaaaacaaatgatattacaacaaaggccactgtgtgagcagactccagtgctgtgctctgaaccacaaagctactctgtctggcttgcaatcctcctttctgctgttgttcccactgtttaaagagcagaaggaagaatgttcttctccctgaaggacgttgtcctataataactgaaagaaaagacaggcccagtgctcatgcatcaagacagtgaagaaggcatagggcctggggatgggaaaagggttgaggaatgtaaggatcacacaaagcttgtcaattctcttcagggtccctgacattaacctgagtgcggttaggtgccgcaagggaggactgacctggaaatcccaagtaactaatttcagtctcagagagacaaattatgacatagagaccaccccaaaaggattctgcagccagtttttgtccatgtgtgtctgttccatcctcccaagtctcctgactgcctaaccctatcctttcttttttttctttttttctttgttgaaacagagtgacactctggcatgcaggctgcagtgcagagatgcgatctcgactcactgcagcctctgcctcccaacctcaagtgatctccttgcctcagcctcctgagtagctgggactacagccaccacacttggctaatttttttgtacttttttggtagagacagggtttcaccatgttgcccatgctggtctcaaactcctgagctcaagtgatctgattggccttcctcagcctcccaaagtgctgggattacaggtgtgaaccacaatacctagtctcatactttcttttgatggctatcatcaacaccttaggtcagtgtaaactggaagactggaagctagtagagtttttgtgtttgtttgttttgaaccaacatttttaagttgagagatttcttattaaaaaatcaggactttcactttctctttaaaaaaagttgaataggctgggcgcagtggctcacacctgtaatcccagcactttgggaggtcgagatgggcggattacaaggtcaggagatcgagaccatcctggctaacacagtgaaaccccgtctctactaaaaatacaaaaagaattagctgggcgtggtggtgggtgcctgtagtcccagctacacaggaggctgaggcaggagaatggggtggacccaggaggcggagcttgcaatgagccgagattgtgccactgcactccagcctgggcaacagagcaagactccgtctcaaaaaaaaaaaaaaacaaaaaaagtgaataatatggcccaaattccctcaaagggcaatggagggtagtggttgctgctttaggacagggcatgcaccctttggttctccacagtccccaccagtccctattgcctcactcatttacaatacctgcaggtttttagatgttgtcactggtgtcttagacctacaagtagctctaagatcattcccaagttatttttttttaaggagactatttctcaaggggcatgtaattctaacagaaggttacaaatctcaaagacacagctttgatagctgacagatagctttagatttagaaaactcaagcaaaacattgtatggattcccctacacacacacatacacacacacgcacacacacacacacaagtaattcccaccctgttcttttgctaatataatattcttggaagaatgacctcagaaatatctcaaagcccatctgtatgggcgatcagatcaccacatttctgggagcaccaaggctctgccatgggatgcccagttctctttataaaacttgacagtccacagggctctaggtgcttcctctttttatatagctgtctgaggtcaccaccaataaattactggtttaaggaaaacaatgacaagcctattccatggaggacagggttcactcactcaattatttcctaaagcagtaccctccttcccagtttgacaccatgatttttgaggcaatagcaccgagcctgtttgctgctgttctttacacccataaagccacacaagcacctgccacaggagcacagcaaactttgtgaacagtcatcctcctggcagtggaactagtagagtaatgatcattgcactgttaattaagtggctgttttgtttaaatgacttaccaggatggctctaaattgcctatatttgtttactagtctagtttattctctttgtataggaaatttgttgactagtcttgactgctataaagcattgatggaaatcactaatcatcccattttagtgaaggcagaccttttcaacattcaagatacaacttaaatctagagtaaaaatggctctcccccaaaaaacagtaataatttcctaaattggtaaagaactgtaggatggaaggtttgggtttgttttcaaagtcacttttcatctgtaggtgttggagacagaaggatttagggaaggaggagagggcggggtgtggttaggcaagggacaatttgttccacctaacaccagcttggaaatagttgacatttgataccattgtctctttgagatttgtaaccctgtgttagaattacttgcgccttgagaaatagtctccgtttttgtttttttttttaatcacttaggaaaacattaactttctctaagtatcccttactactgtcaaggaagtttgcacttttttcctctttcagaaacaaaagcgatcaatttttttagagacaggagaggggccagcgaaggaaccagaagaccctgtgtattctgaaggcctttaatgcctcctgccatccacctcctcctggcacctcctcctttctctaacctcctgccatccaccactgggaaaaggtctgttcctaagctttctgcctagctaacatgaagccaatttagggacagagtacagcttttcatcacacacacacagatacacacactcacacacaaatcaaccagctgcagagcgagcaacaggaggtggcaggatgcttgccactgtgtcactggatttgtaagcatcccctccaaactgtggccaaggctagttattccctgggctaaagccaacctgagaagttggggaccctgccaaatccctgacagcccctaagcctgactctgttgccagagccacacaggaaagtcattcattcttttaagaaaggttcagtaaaagattaaggagcccagtatttgttcagcaatgggctagctggatagaggatatctgggcattcactttaaggaacctaaaatattggagggataggagtatgacatatactcatttaaaagttgagtaacatcacaagggatgccactcaaagcagtatgtacgtaaatgccaaatgacctgggcttcagagccagacagactgggtgcagatcctcattccggggtcacaggccagttcctcatctttccagaccctaatttctttaccatgtaataaaagtaatggcacctgccttgtagagttattgaggggattatatgaggtcagttgcacataacaagcgctcagtaaatgcttgagttttgtttgttttttaaagaacatcatagaatagttgagaataaggtttaggtagcccagtggaaatagaagtttaagattagcccattggaaaacaagccttccttgaaaggggaaaggactattgtgaaaaaagtctcacatcttagtagatactttagaagtggaaacatacatgaaggaggccttctgattccctttttgtcatacaatttgttggcttttttatgaatatgaaaatgattcatgtctattacagaaaatctggaaagcatagaaaaaccccaggaagaaagcaaaaatcaaatataattctgcaccaaggaaaacgcctataaacattttggttttcctccctatattttccaaatgcatattttaacataactgagatcacactatatacacaattctgaatcctgccttttgcacttaatgtttcataagtatttccccatgtcactaaaaattcttcacaaataacattcgcgatgtccatatggaatttcagatgtggatgaaccaaaatcttgtcaactattccactaacagtggttatttagggatgttcagacatttcactatttaaaaaaaaatgtttccacaaatacctttgtggcataagtttttatgagtggagttactgttctgaagttcctgctgaatagaaaatgctttccagtgaggctgtcccaagccacattcccatcagtgacaagcgagagacagctggtcttttcaaatccggagaccaaatattatctttgaaaaaaaatggatttttgcctaatttggtagtcaccaaatagcatctcattgttcttttaattatctgcttccttttagtagagatccctaaaaagatctgaaaggagtcttcagataaaggaaggagctttcttttgtctgtctacaatcaacaaatatttattatgcaaaccattttgctccgagttttctcctctttccctttttggacagatttgggagatctcacctttcaggttttagacatcgtgcagggaggagttttgaggtagggtgcagcttacggtccaggataaaacatactgattctgccactaccaggctttgtgaaaagcaagtcatgaaaacgctctgaaattctagaccttcagtagataggatctaccgtgtctataaaaatatgaagatccttaagttttattaaagattcgaaaaaagtaaaagtgtttttacggttttattttcatttttatttcttaccgttatcgtttattataaaggatattataaaggatacagatgaagagatacgtaatgcaaggcctgtgagaaggggcgtggagcttccgaaacctcttccagccaccaccctccaagaacctggagtttctttttttttttttaattctacaaatgtaatattagaattgattttatctggccattagtgtgtgtcctaactcgttcgtttctgagagtcccatctcccggcccggatatcatctttcctgtgtcagtgaaagtgcagagtagatgagaacctttaaccaccaacattagggaggggtcccagacaaagggggaaagtcatgctctgtagagaaaaggttccctgcctccgaactacctctggaacactccagactgaaatgtttcctcttttgatatagaaaagagggatcgtgtgtagagtgcagtctgggcaatccctctcctcgggaccatttcggggtgggggcctctggggtccgtgtcgcgacgcacgcgcctcggtcccagctatctccgcagcggccaccccgcctgcggacgcagtttctcggccccgccccacactcgctcccccgccccacccagtctccgcgccggagggaagtggcgcgagggggaaagcactgtctgcgcgcccactgcaaacctcagccagtctgagatcgctttaaacgtctgacccccacccccactccgccccgcccagttcttcaacctaatttctgattcgtgccaaagcttgtcctctgctcaaaatcgtggaagacgccgagtatggggaccgaagacctgggttcaagcccggcttggaatccctgcccatccctggcatttcatctctccgggcttatttgctggtttctccgaatgcgggccttgtctggttcacgctggatccccaacgcctagaacagtgcgtggcacgcagttcgtccttctataaatatcggactaaatgcatctctgtgatggtaatacccacacggtgttgtgagaatgaatgagtgattctgtgcaagttcctagtgatctgttacaaaaagtactggtcgctaaattactcttataataaagcatacttttaggataataaagcactattcgcgaattggttaccgctattatgaaattactgagcaatacatatctacatctgatcagtctccagaattatgccaaatcctaccttcttctgaaagtatctcctaattatctgcacctgaccctagtgatgctgtgaatgtgcaagtatagctacatcctccgaaggaaggatctttactccttttacctcctgaatgggctgcgtctgctgaaagcgcggggaatggcgttggaagcttggccctacttccagcattgccgcctactggttgggttactccagcaagtcactccccttccctgggcctcagtgtctctactgtagcattcccaggtctggaattccatccactttagcaaggatggacgcgccacagagagacgcgttcctagcccgcgcttcccacctgtcttcaggcgcatcccgcttccctcaaacttaggaaatgcctctgggaggtcctgtccggctccggactcactaccgaccacccgcaaacagcagggtcccctgggcttcccaagccgcgcacctctccgccccgcccctgcgccctccttcctcgcgtctgcccctctcccccaccccgccttctccctccccgccccagcggcgcatgcgccgcgctcggagcgtgtttttataaaagtccggccgcggccagaaacttcagtttgttggctgcggcagcaggtagcaaagtgacgccgagggcctgagtgctccagtagccaccgcatctggagaaccagcggttaccatggaggggatcagtgtaagtccagtttcaacctgctttgtcataaatgtacaaacgtttgaacttagagcgcagcccctctccgagcgggcagaagcggccaggacattggaggtacccgtactccaaaaaagggtcaccgaaaggagttttcttgaccatgcctatatagtgcgggtgggtggggggggagcaggattggaatctttttctctgtgagtcgaggagaaacgactggaaagagcgttccagtggctgcatgtgtctcccccttgagtcccgccgcgcgcggcggcttgcacgctgtttgcaaacgtaagaacattctgtgcacaagtgcagagaaggcgtgcgcgctgcctcgggactcagaccaccggtctcttccttggggaagcggggatgtcttggagcgagttacattgtctgaatttagaggcggagggcggcgtgcctgggctgagttcccaggaggagattgcgcccgctttaacttcggggttaagcgcctggtgactgttcttgacactgggtgcgtgtttgttaaactctgtgcggccgacggagctgtgccagtctcccagcacagtaggcagagggcgggagaggcgggtggacccaccgcgccgatcctctgaggggatcgagtggtggcagcagctaggagttgatccgcccgcgcgctttgggtttgagggggaaaccttcccgccgtccgaagcgcgcctcttccccacggccgcgagtgggtcctgcagttcgagagtttggggtcgtgcagaggtcagcggagtggtttgacctcccctttgacaccgcgcagctgccagccctgagatttgcgctccggggataggagcgggtacggggtgaggggcgggggcggttaagaccgcacctgggctgccaggtcgccgccgcgaagactggcaggtgcaagtggggaaaccgtttggctctctccgagtccagttgtgatgtttaaccgtcggtggtttccagaaaccttttgaaaccctcttgctagggagtttttggtttcctgcagcggcgcgcaattcaaagacgctcgcggcggagccgcccagtcgctccccagcaccctgtgggacagagcctggcgtgtcgcccagcggagcccctgcagcgctgcttgcgggcggttggcgtgggtgtagtgggcagccgcggcggcccggggctggacgacccggccccccgcgtgcccaccgcctggaggcttccagctgcccacctccggccgggttaactggatcagtggcggggtaatgggaagccacccgggagagtgaggaaatgaaacttggggcgaggaccacgggtgcagaccccgttaccttctccacccaggaaaatgccccgctccctaacgtcccaaacgcgccaagtgataaacacgaggatggcaagagacccacacaccggaggagcgcccgcttgggggaggaggtgccgtttgttcattttctgacactcccgcccaatataccccaagcaccgaagggccttcgttttaagaccgcattctctttacccactacaagttgcttgaagcccagaatggtttgtatttaggcaggcgtgggaaaattaagtttttgcgctttaggagaatgagtctttgcaacgcccccgccctccccccgtgatcctcccttctcccctcttccctccctgggcgaaaaacttcttacaaaaagttaatcactgcccctcctagcagcacccaccccaccccccacgccgcctgggagtggcctctttgtgtgtattttttttttcctcctaaggaaggttttttttcttccctctagtgggcggggcagaggagttagccaagatgtgactttgaaaccctcagcgtctcagtgcccttttgttctaaacaaagaattttgtaattggttctaccaaagaaggatataatgaagtcactatgggaaaagatggggaggagagttgtaggattctacattaattctcttgtgcccttagcccactacttcagaatttcctgaagaaagcaagcctgaattggttttttaaattgctttaaaaattttttttaactgggttaatgcttgctgaattggaagtgaatgtccattcctttgcctcttttgcagatatacacttcagataactacaccgaggaaatgggctcaggggactatgactccatgaaggaaccctgtttccgtgaagaaaatgctaatttcaataaaatcttcctgcccaccatctactccatcatcttcttaactggcattgtgggcaatggattggtcatcctggtcatgggttaccagaagaaactgagaagcatgacggacaagtacaggctgcacctgtcagtggccgacctcctctttgtcatcacgcttcccttctgggcagttgatgccgtggcaaactggtactttgggaacttcctatgcaaggcagtccatgtcatctacacagtcaacctctacagcagtgtcctcatcctggccttcatcagtctggaccgctacctggccatcgtccacgccaccaacagtcagaggccaaggaagctgttggctgaaaaggtggtctatgttggcgtctggatccctgccctcctgctgactattcccgacttcatctttgccaacgtcagtgaggcagatgacagatatatctgtgaccgcttctaccccaatgacttgtgggtggttgtgttccagtttcagcacatcatggttggccttatcctgcctggtattgtcatcctgtcctgctattgcattatcatctccaagctgtcacactccaagggccaccagaagcgcaaggccctcaagaccacagtcatcctcatcctggctttcttcgcctgttggctgccttactacattgggatcagcatcgactccttcatcctcctggaaatcatcaagcaagggtgtgagtttgagaacactgtgcacaagtggatttccatcaccgaggccctagctttcttccactgttgtctgaaccccatcctctatgctttccttggagccaaatttaaaacctctgcccagcacgcactcacctctgtgagcagagggtccagcctcaagatcctctccaaaggaaagcgaggtggacattcatctgtttccactgagtctgagtcttcaagttttcactccagctaacacagatgtaaaagacttttttttatacgataaataacttttttttaagttacacatttttcagatataaaagactgaccaatattgtacagtttttattgcttgttggatttttgtcttgtgtttctttagtttttgtgaagtttaattgacttatttatataaattttttttgtttcatattgatgtgtgtctaggcaggacctgtggccaagttcttagttgctgtatgtctcgtggtaggactgtagaaaagggaactgaacattccagagcgtgtagtgaatcacgtaaagctagaaatgatccccagctgtttatgcatagataatctctccattcccgtggaacgtttttcctgttcttaagacgtgattttgctgtagaagatggcacttataaccaaagcccaaagtggtatagaaatgctggtttttcagttttcaggagtgggttgatttcagcacctacagtgtacagtcttgtattaagttgttaataaaagtacatgttaaacttacttagtgttatgttctgatttctgttgacattcttttggctagtagaagacaaaagtaatacatttatggtatgcaaagcactatcctaggtatttcattgtaatattttacttaccccttatcacaactctgatagattctgcttctgttactaattacattttatagaagaggaaacggaggcacagaaagcctaagtaacttggttaaaggcatgtagtaagtatcaaatcctgtattttaaaccaggtaacatgacttaacgaatctgaagccttcaccactttaaattcaaatggaagtttagaaatggccagccagcacctatttgtatgaaaggtcatctttcagaggataagcatgtataaagaagaaaaggtatgcagtcgtgtttggattttactccaccatccacttgtgaaacccaggtctgtgcaatgccagacggtgtgtgctttcctcatccagtatcctcagtgtagataaccatcactcccttttcacagacaagagaactgagattcagagactttccatacattgcactttcaagggggcaaagccaagaactaattctgtttattgttccagctcttgctcttaactcttacctactattgcccttcagaacacctgggcataagtcaactgaactgctaataaagaaagccaaaagtgaatgttttcttcataaaattaaccatgaccaaaatactcctcttgtaatatcttctatgcaaatctcaacacttttattcttaaactatcgcaacacctagcacctcctcaaggactcagccaagcagctacaagttaatactgatatttgttagagtcagaaggaaggtccactgaagcaagctccctgttgctcacattttgcacaagattttggagacttatgtaaccacccgttgctattaacacgaccattgtgcaagccccaggctcttgagtaaatttcagctttggtttctatttaaagataatttctaaactctagccatacctacctcacattggaacacaaacagggtacactccaggcatgcactcagataataagtaggatataattacgacaatatttggtctacttttagtaattgtttctggcacagaaaatccattttggaggaaaaattgcaatgccttatctttctgaggcaaatcacatttgttcaaggcaaattatagatcctgtgaagggaaataacttaattacttaaaatagaatccaatttggctgtacatttttgctgccgtctatggatctggggtaattcaaagtggtattcatattctacttgaggacacaattagatttcagataggaaattatcttgaggtttcttggttttccctgagaagcctaattggatcacccttcatttaagcatagttttacatgcactctctcaaaggcttagtcttaaagccacaaccattgagacagacttcacttgaaccctctctataaatatttattctccgggagacaatagaagaaatccttggaaggcatgctttttctttctcatcttggcttgaaacctccttaccccagattcctctcctttaccgtggagtcacaacaaaaggaactgagccaaaacaaaattcccagtgtcaccagtcttaatggatatttcattctcccttggaacaaagatggaatagctttttttccaaaagaaaaacaagccttggctctctccctgccccaaaagggtgccccccacccccatcattctctgtcccaaccctgccatgttagagcgtctccaaagccttccctgtgtcgtggtttgtctgacaatgtggggaaacccagtctgctggccagcccttgcatgaagtagctgattgttccctctcctcatcccttatgaatggggcccttgaagttcagtcatgtagattcagttgtataatgaaagctaaaatatttaaattgtatgcatgctgccaataacagcatacatctgacatctaacttattaataacattaagcctgcaactaggggggaaagtggatgttttctcttgcaaagcctttgttttcctaaaatgacacttgaaaatttatctccccctactgcaggcttcccagcccccttttataattatgcttaaattaaaataatgattctgggatactcttttggggagataccctacaggctttattttaataattgaactaagtgtttgtgactttctcctagatattgtcaaatattaaataaaggctccataaacaattgagctgtcttattcccagataatacccatttaggaggggcaaggatccctggagacaaaatttagattactttggaaaataatcaaggcatccccgacacctagaaatgcagaaatgcaaccttgcagcctggcatcgtaggaatttgctccacccacgttgaggaagtctcacccatggctgccagtgtgacttagccagtcagtgctggagagatccgcaagcagccacagatagcattcccatggacacagcctcagagggaggctggtgccttaggggccgataaaatagttgaaatgaattctttaaacacaatggtcatcaaccgggggcaactggcccaacagggaacatttggtaaggtctggaaacatttggggtcatcatactgaggaagtagggggcgcggggaggagtagtagacaaggtgctagtggcatctagtggggaggggccagggatattgctagacatcctacaatacacaggacagcccccacaacaaaatgatctggcccaaaatgtcagtaatgctcaaagttgagaatcccttttttaaggtgatagtaataatcgaaataaggatatagccaaccagtataattctctgaaatagtatgaatccataaaaagcttggtatttgctatggtctgaatgtgtcctctcaaaattctcatgttgaaatcctaaccctcaaggtgatggtattaagagatagggtcttcgggagatgattaggtcataagcatgcagccctcacaatttgtaatgcctttataaaagagatcccagaaatctagctagccccttctgtcgtataaggaaacagctagaaggtgccatctatgaaccagaaagtgggccttcaccagacacaaaatttgctggtgtcttgatcttggacttccaagccttcagaactgtgagacataagtttatgttatttacatgccagccagtctatggtatttcattatagtagccagaaccgactaagacagtatcactggacagggttccagggtgagtctcacttcaatgcactctactcattcccaccttaccgaacccccacaattatcttctacattcatttcaatgttactttgtcatcgtgacatctttctctttgcctgttttcttctctcactggagtatcagcttctcaagggcagggacactgtcatttcttctttgttccctgatgagctgccacaggctgtgctaggaagccatcctacaaagaaaaataaatggtaaaatgctggggattctaattatcatcaaatatctgtctctctaaagccaacgatgtttactcatttaatcctcaccactgcctgtgactcaatttggaacacttcccatttttctccttttatttaaaaaatgagtgatgaggtaccagcctattgttccactgtctgaaactggcttggattaatttaaatcaattttatcaagtccaacaattaaaatcttctaaaaccttctgaaaatccttctttcaactgaaaattccagctggctgcaggctgagttgagggatccccaatgtgaagaagtcacagaagggacagagtttttcaaaatcaaacaaataaaggtgctcaaccaaactacaccaggtgctgtgtgtttatctggcagagccagtccactattaagttgatttacatattacagttcaattaaccagaacccaactcatcaacactcttaattaaagggaattacttcctcgtatttgactctgtctgaagaaaagtaatgtatattgaaattccaggcactctcatatgtaagatgcaagagtcccagcaatattgctagctccattttcaggcgagggcacaggcaaagtttaactacaaataaaggggttaatgttctttctactacacacactataaatgtgaaaacaggacaaccaatttctaggagatgtcctcacattctcaacatattcagtccaaacttccctatcttttctatttctaggtcaagtcctatgtgatagcaataacagttaacattgaccttgagggtttactacacaccaaggggctttgactatttaatcttcgtaacagccctacacagtaagtattattatttgcctattttacagatggggaaactgaagcatagaacaaagcttaaaattggcccaatgtcacatgttttataagtgataaagcctgggtttgaacccaggtcatctgacaccagagtgtgccttcctaagcactacaggaactttattatttgccttaatgttagccaatattcaggaaaataactatgaagtcaaaaacatccttcatgctcttcagtactcttcagggttgaagaccggacactcacctgattgtccttttgtaagtgacaaagcagacactgacattctagaaagatttgcactatttgtggttgaaataaaatgggtttcaagttaacttgatacactgtgcctggcgtatagtaggagcttcatattttgtggaataagcaaatgaatcaacacccataaattcctattcctgggagcacacaaaattctctaagtttttttgttgttgttgtcgttgttttttgagacagggtctcaactctgacagttaggctggagtgcagtggcgcaaacatggctcactgcagcctcgacctcctgggctcaagcaattctcccacttcagcctctggtgtatttgggaccacaggtgtgcaccaccaggctcgggttatttgttttgttttgttttgtagagacgggagtctcagcatcttacccagactggtctcaaactcctatactcaagtgatcctcccacctcagcctcccaaaacgctggaattacagccatgagccaccacacccggccctaagtattctgattaatgttcctgtgtatgacttgacttccttccttcgttccttcattctttcacagtcattcacttactgaatcatttactgaacaccactctggaccaggcaagtatgaaagctgctcacggtagagtggaagatgtagtcctttgatgttctagacatgctggaaaattagctaaagacctcgcagactttccaatgtccaacattttaagaaatccaagattccacccacccacccaattttccctcagtcttgctcccactcattccccatttaaggggtatcatatcccagcccacctcacgagctgggtgtcaggcccccaatcctgatcgtccttcctgctttaccagcccaaaggaagctgttcacgtcatgaagataagagcaaaagtcctgccaagccgtaggatatgggaaaaagccctggtggtagttttttggccttctgttcacagaagacaacttgttaggctcctgggattgaagaaggaaatcaagaccatcatcttggaccacatcccacttcctttggcaagcctactctgtttctatcagtccaagtgagcttttccatcctaaattcttagcacatgaagtctgagacatgggaagatcccacacataaaaggcttttgaaaagttaaaagaagctattgtaaatggcattatcttctttttaaatttgtaaacattgttttctcaacaaattcaatgtcttaagcaccaagacctttgcagtctaacatagttaattaatagatacttcatttgattaaaaaacaatcagattccataaggctgtgccaatgttggctaaaattatataaggttagctcagttgtttagaacttgaggtttccaaagccaaaatcaagggtgccagtccccctgggccatttttaaagtaagctatacctgaatgtaagctctgtgaatgtaaagactatgtaggtctgttttgttcatagctgtatttccagtgtctagaacattggtcccaagctttttctgtaaagggccaggtagcaaatactttaggctacctagagggccatgtagtttccagcacaaccactcaactctgccatggtaacaagaaaatgcataaaaaagtgagtgtggctgttgtgtcccaataaaattgtatctgtggacattgaaatttaaatttcatgaaattttcatgtgtcatgagatattctccttttgattttttttcaatcactaaaacatgtaaaaaccattctttgcttctctgctattaaaaacaaaaacaggtggcaggccagatctgacctgcaggctgtggtttaccaacccctggtctagaatatgcttaagcgatagtagaaattttataaaaatgaacaagtgaaactcgaaatataagaaagtttactctttaagcttcaggcactgaaagccccagagaactagtgactttattcacataaatgtgatacctaccacttataaggcacctttactattgacaaaatgctttcacaggtaaccctcaatgtgggtctgggtactggtttgccatattgcttggcaaaatcttgcttctttactgggtcttttattttagaaagaacaatctggggtaagagagttgcttttttttaatccacctttgtgcagctgtgtcactttcatctcccagagtgctgataaaggtggcatctccttctcttataactccctgaagctacagcagtgatgtctcactaatgaaagttgttgaggtgcgctgactaacctttgtctggtgtgagcaacatcagctttgctcctccaaagtgataatcaccaatcacaacttttggcagtgactacacagacagtccgtaaataggacaaaagaaaaagccataatccatggcaatgaatagtgtttcatggccacaagctgagccacaaaagcctaagaaaaatcaatggtgcagaaagcgtttttggacctgaccccagctcttgggggaaggaggataattctatttccttttagccttcaggtgcctcgtgggaatatcaaaactaatctccaaggggctgctctgttctgtctcttactagaaacatctccaagcaaattcattactttatagaacactcttcccaaggtgagaggcccagcttctgtttcagatgaaaagaatgtgagaagacgctgaggaaactgccaagtgctttctgtgtaaatgtgagttttctgctatatctggatgacagcacaaaagcggctgctcagttcccatggtccagagtaaaggaggacaaggcgtccaggctaaggtggccctggaaaaaaatccctagccagatggaaaccccatgcgtatggagtggaaaagaagaaagatgtgtggaaatagtaaataaaatcagaaaggactcaaagtaccccttcgcaaaagaggaaataaaactgataaacaaaaatatgaggaaatgttcatcctcactagcaaccaaataaatgaaaatcaaaataacaacacactgtttcttacttatcaaattagcacacatttttaaaataataacgtcccaagggccagagtagagagagccaagcacctctgagccctgctggtcagacataagctggccagacctttccaaagccaagggcaaacgtctccagagccgctacgctcatcccctttgatacagagagaccatttctagacacctaatttcaggaaactgatcctaaatcttaaaaatactctgtgtacaaagttgagtattacatttgtaataacaaaaaaaaaaaaaaactggcatttgcctaaacatctgacagcaaaatgagaatgaaacaaactatggtgaatctacagaatgaaatattatccagcttcttaatcaatgtttaaaaagaaaatgtttttaaacattcctccctttcctacaccttttaaaacaagccaccatgcacggccgattggcttgttttaaaaggtatacagaagggaggaaagtttgttagaaaatgtttacgatgtgtaaaatgaaagaggttcaatagtctgcgtatttttttaaaaagataaaatgttgtcagcagtagttaagtaataagctttggggcaattgtaaaatatttttttcttttgatttctccctattttccaaacttactataatgaatagtgaaaagataattggcttgggtttgttgttgtttgtttgttttttgagacagagtctcgctctgttgcccaggctggagggcagtggcaccatctcagctcactgcaacctctgcctcctgggttcaagcaattatcatgcctcagcttcccaagtagctgggattacaggcatgcaccaccatgcccagctattttttttttttttttttttttttttttagtagagatggggtttcaccatgttggtcaggctgatcttgaactcctgaccttcaaatgatccacccgccttgggctcccaaagtgctgggattacaggcgtgaactgattgagttgttttaaaaggtgtagggaagggaggaaagaagtctacaatccccatgctccttcctaggctataagtactccaagaaagaaccctcgtctcttccttttcctcttttaatcaactcaggacccaactaggcactagataaatgttgagttgaactgaaataggcatttgtaggatatctaaagaaaaaatcagacatacatatcaccctcaaggtacttagaatatagtagagtccatgtactgcataacaatgttttgatcaaagacaggccgcatatatgatagtggtcccataaaattataataccatgcatttactgtaccttttctatgtttatatgggttaagatacaaaaatacccttgtgctacagttgcctatggtattcagtacagtaccacactgtaagctttataccccaggagcaataggctgtacagcctaggtgtgtagtaggctgcaccatctggctttgtgtaagcacactctgtgatgtttgcacaatgacgaaatcgcctcaccacacattttccagaacacgtcctggtcactgaacaatacatgactatagtagggtttactagtagcagaaatcctaactatattatattcccagtagtgcctttgatgcagtctagcatttctgaactgaaggtcatgatctcaaggaagcattctagagaattcccaaagtataggagaatgcaattcagggctgtgtgtgagcagccacaggccagactgaacttatggcaagtgagcatatttcaaatcaatacatactcatggcaccatcttcacaagaccagcccgttaaggctttagtagaagcaatacagatctggggtttctcaaagcacttctcccagagaggtcaagtctttcaaaatccacaggaaagtaaatatactagaaagccctaacggaaatctctgaaagggttaggcattcacacatgacggcaatagtgtgggggcctgaaatgggaacaatgtgtaagtggtcaaccctaaatattccatttttgtattgtattagaaaggaaatgtcatgttggggaagaacttccttcattcgaataagtcctcagaatatagccgcacacaacaatggtggtttgcagcatgtcacatatgcaaggttccaaggtgggaaaagccagcgaaaaagaccaatgctcactttgtggagaggattctgcaagtctgttacttttattacttgagataggctcaggaatcagatcgaaaacagggactagaaaggaaaagctaacattttgcctatagttaaaatgaaattaatatattggccaggtgcagtggctcacgcctgtaatcccaatacttcgagaggccgaggtgggtggatcacctgaggtcaggagttcgagaccagcctggccaacatggcgaaaccctgtgtctactaaaaatacaaaaattaccaggcatgcttgcatgca

SEQ ID NO: 920 - DNA, 1811 bp, Homo sapiens
cagtttgttggctgcggcagcaggtagcaaagtgacgccgagggcctgagtgctccagtagccaccgcatctggagaaccagcggttaccatggaggggatcagtatatacacttcagataactacaccgaggaaatgggctcaggggactatgactccatgaaggaaccctgtttccgtgaagaaaatgctaatttcaataaaatcttcctgcccaccatctactccatcatcttcttaactggcattgtgggcaatggattggtcatcctggtcatgggttaccagaagaaactgagaagcatgacggacaagtacaggctgcacctgtcagtggccgacctcctctttgtcatcacgcttcccttctgggcagttgatgccgtggcaaactggtactttgggaacttcctatgcaaggcagtccatgtcatctacacagtcaacctctacagcagtgtcctcatcctggccttcatcagtctggaccgctacctggccatcgtccacgccaccaacagtcagaggccaaggaagctgttggctgaaaaggtggtctatgttggcgtctggatccctgccctcctgctgactattcccgacttcatctttgccaacgtcagtgaggcagatgacagatatatctgtgaccgcttctaccccaatgacttgtgggtggttgtgttccagtttcagcacatcatggttggccttatcctgcctggtattgtcatcctgtcctgctattgcattatcatctccaagctgtcacactccaagggccaccagaagcgcaaggccctcaagaccacagtcatcctcatcctggctttcttcgcctgttggctgccttactacattgggatcagcatcgactccttcatcctcctggaaatcatcaagcaagggtgtgagtttgagaacactgtgcacaagtggatttccatcaccgaggccctagctttcttccactgttgtctgaaccccatcctctatgctttccttggagccaaatttaaaacctctgcccagcacgcactcacctctgtgagcagagggtccagcctcaagatcctctccaaaggaaagcgaggtggacattcatctgtttccactgagtctgagtcttcaagttttcactccagctaacacagatgtaaaagacttttttttatacgataaataacttttttttaagttacacatttttcagatataaaagactgaccaatattgtacagtttttattgcttgttggatttttgtcttgtgtttctttagtttttgtgaagtttaattgacttatttatataaattttttttgtttcatattgatgtgtgtctaggcaggacctgtggccaagttcttagttgctgtatgtctcgtggtaggactgtagaaaagggaactgaacattccagagcgtgtagtgaatcacgtaaagctagaaatgatccccagctgtttatgcatagataatctctccattcccgtggaacgtttttcctgttcttaagacgtgattttgctgtagaagatggcacttataaccaaagcccaaagtggtatagaaatgctggtttttcagttttcaggagtgggttgatttcagcacctacagtgtacagtcttgtattaagttgttaataaaagtacatgttaaacttacttagtgttatgttctgatttctgttgacattcttttggctagtagaagacaaaagtaatacatttatggtatgcaaagcactatcctaggtatttcattgtaatattttacttaccccttatcacaactctgatagattct

SEQ ID NO: 921 - protein, 348 aa, Homo sapiens
MEGISIYTSDNYTEEMGSGDYDSMKEPCFREENANFNKIFLPTIYSIIFLTGIVGNGLVILVMGYQKKLRSMTDKYRLHLSVADLLFVITLPFWAVDAVANWYFGNFLCKAVHVIYTVNKSVLILAFISLDRYLAIVHATNSQRPRKLLAEKVVYVGVWIPALLLTIPDFIFANVSEADDRYICDRFYPNDLWVVVFQFQHIMVGLILPGIVILSCYCIIISKLSHSKGHQKRKALKTTVILILAFFACWLPYYIGISIDSFILLEIIKQGCEFENTVHKWISITEAFFHCCLNPILYAFLGAKFKTSAQHALTSVSRGSSLKILSKGKRGGHSSVSTESESSSFHSS

SEQ ID NO: 922 - DNA, 39414 bp, Mus musculus
  misc_feature (1)...(39414): n = A,T,C or G
acctttccctgagcacctgcacaacagcctgtaaggttaagctcagccatcagtcgctttctccagaggtctgtgctgagctcccagcctgggacagcattttggaagaaagtactatattaagatttttctctttttctcctcctctcaccccgaaccccagcctagcctagctttggatctctctaagtaaccgaggatggctccgaactcccaatcttcttgcctccgaatttccagtgccaggattatgggtgtgtggattatctggcccatctttatttttctttttctcttcaaaatcgtacctatctctgaagctagattgcctactttttaaactatgtggctttcgtatgttagtttgtacctcagtttcctgctctgtaaaatggaatagcaccaccccccacccccagtattttgtgagacttaaatgggttaatgtgattgaaagaataagaaaaccacccagtttatcacacatgtgttcaataggagtttattattacgggactgaattcataatctatattcgatgataataatccatactgttcttgacaaggacctgagtttgcactagcaactcactttggggcaggtgctcattaccacctctaactccagctccagggaacctgacgtcctcttctggtctcagagtatactggcactcatgtgaacatgccagacttaacacatgcacgtaattaaaaaaataagaatcctaaaaaaattaaaacgatgttttatattactacatttgtatcatttataagcaaatactcatatgttggaaacatgtgccctggaagtgtgttttacggctaggagtacttgatcctgtgagtttggagactgggtcctgaagcaaagacgaagactgatgtctttatcctcagagcctagtcctgtcagcggaaaagattcacattggcaaatgcagcatgccgccaaaacaggcagaacccgaggtttattctggctgggatttggtctcttagggattattttattttatttttttaaatttccacttctaaaaggctaggttttaattagacaaaggcaaagagacatcttacaatcccaggctggatttagggtgaggtgcgccctcttgtgacctaatagcatatttctctttctgcgcactagctccgtttgtttcagctccttaggatagaatggctgatgtggaggtctcacaggtccctgcaaaagtgtctttccactttcagacgcaaacactctatccaacacactcagcccactcagccctccttacggtgtcaatgtttacccaagtccttagcttcttcttcatgaaatgtcaggcagcaagcaatgtaacttctggggttttaggatttcaaattccagccttggtacttactgtgcatatgattttgagcaggctaatttatttatatctctaagcttccatccttttcataaaatggggtaacagtaccaacctcacagagcttcgggaacaattgaacaaggtgtactaatgtaacctgttaataccagcacactacatacgctaagtaaatcactgatatattaagcaatgaatcagaagccgggtggcagtggtgcagannnnnnnnnnnnnnnnnnnnnnnnnnnnnnnnnnnnnnnnnnnnnnnnnnnnnnnnnnnnnnnnnnnnnnnnnnnnnnnnnnnnnnnnnnnnnnnnnnnnnnnnnnnnnnnnnnnnnnnnnnnnnnnnnnnnnnnnnnnnnnnnnnnnnnnnnnnnnnnnnnnnnnnnnnnnnnnnnnnnnnnnnnnnnnnnnnnnnnnnnnnnnnnnnnnnnnnnnnnnnnnnnnnnnnnnnnnnnnnnnnnnnnnnnnnnnnnnnnnnnnnnnnnnnnnnnnnnnnnnnnaaatccgcctgcctctgcctccctgtgctgggtattaaaggcgtgcgccaccactacccggctagaatataatttctagctaaggaatttgaagtgagttactaaaactaagatgtagaattcccctaaatgcaacactagctgatgtagtgagccctttcccaatgcttgctactgtcaaatttgctcaagtttcatgggtttcaatagaaataatagccagtagtcgttcaaccttatgaacgccaggagggagacaagctcttcacaaactttgcatatttttttcccaacaacactcaaaggaagatttcagtattattacacccattctccagacgaggaaactgaagccatagcagtttaggggagtatcttagtttgggatttccattgctataaagagacaccatacaccaaggcaacttttataaaggacaacctttaattggggctggcttacaggttcagaggttcagtccattatcatcatgtctggaagcatggcagcatccaggcaggcatggcgctggaggagctgagaattcttttttttttaaaagatttattttattaatatatgtaagtacactgtagctgtcttcagacactccaggagagggcgtcagatcttgttgtggatggttgtgagccaccatgtggttgctgggatttgaactctggacctttggaggagcagtcgggtactcttacccactgagccatctcaccagcccggagctgagaattctacaccttgttctgaaggcaaacagaagactctttccaggcagctaggaagagtgtcttaaagcccacccccacagtgacacacttcctccaacaaggccacacctcctcatagtgccactccctgggccaaggatattcaagtcaccacagggaggtagcacaattgataaggtacctgccacatacatgttcaataagggtctcagttcaggtcctcagcattcatataaaagccaggagtgtcagtgccataggtaacgcctgtactggcaagtgggatggggaggcagagacaggtagattcccagagctcatgggttagctaacctagctggatccttcagttcagtaagagaccctcactctagtaatcagggtggagaatgctccataaagggcattcattttgacctcaggcctccacaggcacgtgcacctgcatgcacagtgcatctatccacacaaatatgtttacaaaagaggcgtttggagtttgctggagcctttgcagctagggagtatcaaggcatggatcccacattgaaagcaagtggctgcactccatgttttacctacatattatctttaatctcccaggaacctaccctgagatggaggttttgttctgtcacctaaattttacagctgaaaaaaaaaaaaaaaagacaatcgtgatggagttgtttgtttgttcaaggacatacagatgggatgtatgaattggggtttggatctatggctggctgacccacatttccagcttcctattagatggctcatacctcaagagtatttacagtgtttatcatagggtttctattgctatgacaaaacgcagtgaccaaagcaacttggggaagaacgggtttattcggtttacacttccccgttgtaatctgtcactggagggagccaggataggaactcccacaaagcaggaacctggaggcaggagctgatgcaggggccatggaggaaacgctgcttactggcttgctcagtctgctttcttacagaaccctagaccaccggcccaggggtagccccacccacaattgcctgagccctccactatcaatcattacgagaaagtcccgcaagttcgcccatagtccctcttatgaaggcatcttcttcacggaatctctcttttctctgatgactcaagctcgtgtcaagttcgcatgaaactagccaggaccgtggaacaaagcaactaagtattacactaagattattcagctacagggattaacgtgtttctgacacccagggattcaaactccgtaagactaatttacataaaaatggctagtatctgctatctatagttggatcctggatccgaattaacagttctaggtttattgcctcactgatgcctcacataaacctgtcacatgaatgctattattcttacttcacaagtgaagaggtgagatatagaactctgccaaaccactcaactaagttgtgaatttgtgaatttgaaattgtagttacaacagacaaactctctcttgcccaatagatggtcactgtattcaccctctttcctttttttattatttttccctactctctccagctcaacccagggggccccacgcttcttcagtagaccccgaccccacgcccttctaatctagactccacccagtaggcggcaccgtcaccgcagaaccaatggaagagaatagtatcgagctacacccccccaggcattggccctgcaagatttgttccggtaccagagcgcctgagaagatgaggcactcattggctgacgtcatctgagaggcggccgatagaggagtggccaccggtgctcgcgcgttgccttttgggagttgtggtctcagagatcgggttccagggctggcggcgctgggactatgcgtcccagcatcccctgcaagagcccgggagcacttccggcctgttgagaagtgggtgtctctgtgggtgagtctgggtggcggatggggtgcagttgagaatcaggcgctgggctggaggctttggaggtggtggtacccgcgggggaggggagctgggaaggtgagaggggaaagcaagcatcgtggcgtgtgtgtgtgtgtgtgtgtgtgtgtgtgtgtgtgtgtgtgtgtgtcggggcgggagtgcgggcgggcagaggctgcagcgtgtggagatgggcagggtcaccgaggggtcgggatgaagagtgagttggagaggcgggcagtgagacgggtcttaccgaggtctgtgggtaaggtggtagagatgcgttttggctgtgaggggaagttaccttagggtctagaaaagcacaatcaagggaagagagaactcaagggccctggcaaagaagtgaagaggccctgagcggaaagtctgaccttaaaatagtgcttcattctcgacacctgcgttcatgtcatctgtgacgggactggctattgtgttcaatcccaaacctgtacttctttcctcataactgatagaagtgaaaggcatctttatctactgacccgcccaccctcgactgacccgcccacccctgctgacccgcccactgacctacttgttttaccagctgattccacctgcgcctgcattcttcttcatccacgccgtttgctgtacactgttcgaggcttgccatttctttagtatctcttaaaatgacctctgtcttccgggagcctctgcagaagtgtccacattttcatttctccaactcggagaaacattgcagctagtgtgatctgttgaaaccctcaactctataccttccgtttgttctccagcttggaatccatccctggcatgcaacacgtgttgaatggaatctgatctagtagattcttcataatgctctttgcagcccacttttcccatactgcacgctccggggctgccaaggtgtttcccattctccaggtgggccattttgcttctctactatttcatagcctgcctctctgctgtaacctccctcccccattctctctgcgttgtactcaagaaccaaatcaacagttccttaagcaaattgccacctccaacttcccagctcccaaatcacactttctttatgacattggattaatataattatctgtgacttttaaatttattaattatcattattattatttgtctcttccactagatagcttcatcagggcaggcagtgtctggatcatctccattttctttggtccagcccagaacagcagacatctaatgtagatccagcaaatgagtaaagacttggtgaatgtgggctaaagactctcagggggagctttgttagaccacgtttgaaaatggctatggacttccagggctgtgagcttcaatcttcttcctgacatcgatatctgctgggagctgaggttgttgggggcttaaggacagtgttggccaacacatagggatgcatacagcggcttcctttacctgaggcctggcagccattgctaattgatcacaacatatatccatatggagctcatttctcagcagactcctctaggtagcttcccccatgatggaggatggtcggctaagtgaggcctatctgccacccccagttccagtccttagatgcgagtctcccctcttacagccatagattgcatagttagcccagtaggactgacaaccattgggagctcccagctgcttagaggatcccaaccaatctggtcctctctgtggaccaagggagcatcttctctcctcctctgttgtcacaggagtgggtggaggggggggggaacttagctccgcattcacatccagtacccagttgccaaggccccgctcagcttccctgtggtaaagtggaacaacttaaaaaaaaaaggtttttgtttttttgtttttaaattaaatgtgagaattttatacagtgaattctggtggccctgattttgattgagtaccctttcatcatttggggactctgcacccctcctaagtctttctgggaactggaagtgaaacctttgtgatttatttattcagacttctgtctggaataatgctgtaggaaagacacgctgcttccattcagtgccaagaaaggctcacaaaaagaaaagcaggcggggagtagcggagacatgaggagtagcaccacaagaggagacatagtggcagcccacgtggggtgaagtccctcacgtgtctgaagcaattctggccgttgccagcatgtgaactctagaggtctggtttctcttggagaagactgaagaaccggggacgtcctgggctcgccgtcctcttagggctccacgatgggtcacagtccctgcccgtatttactttttccgtttcaggctcgctgcctgcttattctattcttgtttcacaagttagcctgtgataagagctgggtaggacaggaggctgtctgacctgcacggtgtgacacagcagctaagaggcagaagtctcactcttccatggatgttcttgtctgtctcccgtggcatgattctagcaggtaggaggatgtgacgggattacggaaaatggtgggagactaacttgggcctaggtcctagctcagacacttggtgggtttaggactttttctcccccctctctcttttcccccctctccctaccttctctctttgagaagttctgtttctctctatacatcatagcttgggagtcctttgttaaggactcagtgagcactcagtcttggcataagctcaggttttctagtgtgaccacgaggcagaagaattggagacagcccgtttccattctggtcttcctgggtcatgggtgttataggtcagtgacggtccctctacttctttgtctggaggattctgtgcaaatctagatggagaatgtttaggactgtacttagtgcggataaaaggcacctcttggaggcctcggtgtatctctggaggcctcagggctggagaatgctcttgccacgctcctgactgacagtgtggacctcccttcccccaccgtagtctaggccatatggatagatcgatatatgattctgacaagggtttcttccatttgtttgaaatgaacttttgaggtttttcggatctctctcccccagaagatgtcctcggctctggcttggtgactggtggcgtcattgcctggcgggtgtctcctttatgcaggagtgtaggagtctttgcttgccaacttactgtctgttcctagactgtaactttgtgaaggctgaagggactttctgtcccagccactgttggatctgtagctcccggtacagtgcagggcatatggtgggtattctgtgaatgcctgacaggttactccttgtgtatgacagtgacagattgtgtgtttggattagtgtgttgggaaaatgtgtgttaaaaaaagttatgaaacattaattcttcaatataaatcatggacattctagacttttgatgtaacagatttacatatttaatacaagacaacaaaatctctaatggcactggtatttgttgtctatgaggctgggtcccatactggcctggtatacctcagtgcagtggcactgtccattgtaggggtgggtggctgcaaaccatgggtgagcatttatctcagagccatgtatcagctgctttgggaggagcagggatggtggccgggcatgatagagcacaccaaggaatgcctggaggaagtgacatgtagccacatgtagcagagggatagccagaagtagcccggtggccctgtgttctctaagcatcttcctacgtacatggaagtctttttggccagtctctatctttttgtttttgcttttgttttttgagacagggtttctctttgtagccctggctgtcctggaactcactctgtagaccaggctggcctggaactcagaaatccgcctgtctctgcctcccaagtgctgggattaaagcgtgcgtcaccacgcccggcttcagtctctatcttttgttacccttgcctctacccatcctagtcagatggcccagaataccagatgctgccatcctttgcctctggtcctgctgtgccattcctacttggatgcagccagtggcctcctgttgggtgtgtcttatgccattagactttcgacgactagcttgttttctaagagaacccagtatgggtgtcatcagagaggctgtacctccataggtgccaacgtgcacgtgtctccacagagtgtaataaaagatagtgccacgggaaggtgggagtcggggagagaggaatctttttgatgtgggcaggccaccagttgtcctttggctagtgtgctccggtcctcatgagctcacaacatcactgtctgctttgttttctccatgcactgagtactgtgctagagccttcagaagctgtggtctgggcactgtggttattacaatagggtgatcatggttgcaagggagagcatgagatgccacaaaagctggtgaccaaggacaagtcttgtatcagggagcatgtagtttttgtggagcttgccacaaaagatggcaactaggattttattgtttatttgctttatgtatgtatgtatgtatttatttattttttgctattgtagctcaagctggtcttaaacttagaatcttcctgcctcggccccctgattgctggggaaggtacatttggttttgacccattgaatatgaggtatctagaggacagtcaagtggaaatgttggagccatgagctatgcagacagctttggctggagtttcgagaaacttcaatttagagatggtgaatgatatctggtgtgtggggtgactggagagtgagggggggattttgccagatgaccatccctagacgaggaccaaggctcaagtttcagaaggcaggtctcatggaaaaggtgaccctcttggggtccggctttggggaaggttggctttggaacctggtgtagaagggaggaaggccacactagggtcaaagcccagaggtccagggttcttggattaaacatttaggcatgtcccaaaagatgtagcatggtgctgtcttcttgtaaagggaactgggtgctgacattggtgcctgatcacggtctcacttcctgccctttgcaaagcagtgtctcagagaagcctcagagacacttccacagacttccacagaggttgtggaagttatgagagaggcgaaggaagcagtgttcctgggtcctctccctcaccgtgccctttgtctttctaccttcacagtcttggggagctgtccccgccaacccccaggagccccttgaaggacacattgtcaatgcaggaagcagccagatgagacagctccgctgaagtgaagcacccgggccagatgatggctgtggcctcacctccgccagagccggaagacctcctgattgtgaagctggaggaggactcgtggggatcagactccagacccgagaaggagagccacagccccgtccctggccccgaggtttcccgccggtgtttcaggcagttccgataccgggatgcagctggaccccatgaggccttcagccagctctgggcgctctgctgtcgttggctgagacctgagcttcgcctcaaagaacagatcctggaactgttggtgctggagcagttcctgtccatcttacccagggaggtgcagacctgggtgcaggcacgacaccccgagagcggagaggaggcggtggccctggtggaggattggcaccgagaggcctgggctgccggacagcaggtgaggctaatagtctgatctctaagaagctggctaggcaagatagcgggcctgaggttgagttaataattgcccccaaattgccataatagccatcattgagcacctaccgtttcctgagccctgccgtgtagcaggtagtattccaaccgtttgacttgcttaattcatttaattctgccacagattaataaggtgggtcggtactattagcctaattttactagtgaggaagtggaggcaaagaacggatagataatttgttcaaaatcaccagctactggattatagaggcaagatttgcacttggcaaggcctgacaatggtgtgtgcctagccaccattgagactgcctccctgtaccattcagtgtgcctcctctgtattatactggatgttcaacccagtcatcacccgtaccgggatctctttggatgcttacagcagcccatagacagaaatagttttaccttctccattttgcagtgtaaggttctaagactcagagggttcatggaggtcacttggaaatggaaccagagcctaaacgccccatctctgggtttcaaggtcatgcatgccttttctactacagaactagcgcctcatctgcaaatgtgccgttcaaatgcctccaagggtgaggctcaggtgagcacccacggtgcttcaggccctgttctgagcctctcacatgtgcacctcattcagtcagccactgggtgctgtctttcaagtgagctaacagcaaggtaagtaacttgtctgaatttgtgagtggtagagcggaaaaggggaggggccttacggatcccacctctggagcttcagcagtttccaagcagctctcagagcctatgatgtcatgtgtcattttcctatggcccagaattaggatcctgcttgccgctgccttgtagagtcagcccctgtagccggcttcaggctaaggggccctttcggaacttgcacctcaaacccttttggctctgcacttgttacagtcaggaatccccatggcctcgtactcgaccacacttggttgtgaggattctgtgtttgagaatacgtatgctgtgaatgacaaggttctctgtccatttaaactgtaaagctctgtacagatgagagagtcaggagagggagggccaaggttggtggctctgctcctgggctccttacaaactgacaggaagctgtcatttcccatcagagcacatgcctcttagtagacatccccgctccctccaccaccttcccacacctatgttctgtctttcaagaagccttaagaaacaatggaagccttgggacttgacctgagtgggggacgtgagagaggggggacgtgagacccctgagatgggggacgtgagacccctgagatgggggacgtgagacccctgagatgggggacgtgagacccctgagatgggggacgtgagacccctgagatgaggactgacttaaggtgttttcaatgctccatctgtgaaatgagaaggcagacgaggctagtttttcaagtgatacccctgtgaggtggccaaaggttgaacccctctaaaatagagagaagacataaaacaatggtgttctctctggtcccccttgtccatgacctccacttttactctccagcttctctgcctgctcctgggtcctcacgtagtggtacacaggggagcgcctcccttcttcagtgcatgcgccacacctcgtagcctgtgctgcaatcctctctgagtcttcgtcctcctctctggaggcaaaacccaattcttcatgagaggatgaaatttatgagcctcaccctgtggtcagtgccttcattcagggctaaaaccctcaaagggatctttgagtaccactgtcttacaatctttagcttatttcgtctggaaccccactcttcatcaggtattctgatgaagtgttcattatttgaaccgagtttttaggttcaaaattgagcagtgagtatggtgttctcagatgtagtctccatcacggtcatcatcccctatcagagtagagcggtcattaccccagtgagcccccaccaacatcatcacccctcagcgtgtgcatgccacactgagcctcactgctggaggtatgcgtcgtatggattttggcaggcacatgaagacatgtgtctgctattagggtgtctcacgtagtcgcctaactccctcaacggtcctgtgtgttctgtgtactgattcctttccctcctaatgtctagtaaccattcatctttctactgtcatgtagagcggcccttccctgaatgccacagaggtggagccacacagtctgtgatctttgtgcttaggctttttttcttttcttactaagtgatgcatgcttagtgttcttccatggcttgagaattgcttttcttttgagcactgaattctgttctgttgtctgggatgtaccagttcctccagtccagacagaaggatgtcttggttgtgtctctgttggcagatatgattgacagcactgtaagtgtcacatgtatgttttttgtgtacacataagttttcaggccatttgggtaaaactgaaggattgcgttgttggatcacatggcaaagggatgtttttgtcttataagaaactgttggagctggtgatggtggcgcatgcctttaatcccagcacttgggagacagaggcaggtggatttctgagtttctgagttcgaggccagcctggtctacaaagtgagttccaggacagccagggctatacagagaaaccctgtctggaaaaactaaaaaaaaaaaaaaaaaaaaaaagaaactgttggactgttttggaacgtggccctactattctccatcttccgttttgctggcagtgagcatgagtttctgtggttttgtgtttggatgccaggcattctggtagttgtgaagtggtctcacattttaatttgtcatttcttatatgtgttgatgggtacacatgtgggcgagtttgtatgcacatgttagaggccacaggttgatgtcaggggtctacctcaatagtttcttattagttagttctgagtggttacttactgagcctgttgtttactgattggctagagttgctggatagtgagctccagggatcctcctgcagcctcctcccttgggctgggatgacaggtgcacactgtttttacctgggtgctgggaatctgaacttaggtccttatcctgctgtggcaagcactttacttactgagccttcttcctactacccaatttcttaatgattataaataccttgtcgtatgcttggttggcatctataagtctttggtgaggagtctgggttattttggtccttttgcctctccttataagctaagaatggatgttaaacaaagatctaacaaaaattctcaataaaatacttacaaaacaaattcagaacacatcaaaaataccatctaccacagtcaggccagctacatcccagagacagagggatggctcaacagtaaataaatgtagtcttgcacataaattgatttaagagcagaaaacacaggatcatctatctcatatgcagaagaggcctttgtggaactccaacatcccttcataataagagttctagagaatgggacaggggacatatctcaacataataatgggtataatacaagcccacagccaacatcaaactaaatggaatattttcactgaaatcaggaataagacaagacaaacatatctcctctttcctttcctggtcaatatagtggttgtattcttagctagagcagtaagacaggagagagataagcaaataggaaaggaaaaggtcaaaatgtctaattcatagctggtaaatacattaaaaaaactattaggataaaaaaggacaaaaatcagcttcctatatgcaaacagcaaacactagaaagaaatcagggaatcattattcacaattaccacccccccccaaaaaagaccaacaaccttggaataaatttaatcaagaaactgaaaaacttgtacaatgaaaactttaagacaatgaagaaattgaagaacataccagaagatggaaagaccgtccatgctcattgcttggtagggttaatattgtgaaaatggtcattatactgaaagcaatctacagattcaataaagtcctcatcaaaagcccaacacagttcttcatagaaataggaaaaaaaaatcttaaatttatatggaaacacaaaagacccaggatagctaaaaccatgctgactaataaaacactggagatttgcacttctgctttcagattatactacagagatatagtcataaaaccagcatggttctggaattcaagcccacacatttgataagtgggacagaaatgaggacctggataaaaagcccacacttctacagccacctgattttgacagagaagcaaaaaagtacacactggggaaaagacagctgtctcagtcactgtttgattgctgtgcaaagataccacgaccaaggcaacttgtaaagggaagctacagtgtcagagggctcttccatgaccatcatgggtaggaagcaaggtggtgtgtaggcatggtgctggagcagcagctaagagcttacatcctgatctgcaggatggaggcagagagacaatgaagctgtggcaaaggatatttgatcacattgtgaaccccaagactgtgaactgtaaaaaccctgtttctaattgtggtgtggtatagctcagcctttgatcctagagctctctgcttactgtggacaagtgcttgtggtgcggctcagccctagcacacacctgtaagccaagagctacataaaatcaaccctaggtcaaggggcagagctagtaaccagcccacggggaatgaacataagcaaactgaaccaagagtcttttgaattgaagggcatttaaaacagtgtggagaaggagagctttttccttctgggaggtcagtggggtaggaaggttggctgggttctttctccgcctctctgagctagcctgcgttcaccacggtatctggctcccgaggcttcatttggcaaaatcgaatggctgggattttttaattaacaacaagactgggcccactgtgggcttttaaaaccttaaagctcatctccccatgatatatcttctccaacaaagccatacctcctactgcttcttgaacagtccaccaactgggaaccagacatgcaaatatatgagcctatggggctgttctcatttgaaacaccacaatagcatcagcagcacatggtgatggttgaaccggatagcttgcatgtagaagaaagagctagatctctcactctacacaaaactcaagtccacatggatcaaggacctcagcataaggcctgataacttgagtctgtcagaggggaaagtgggggtgggtcggggggggtatgctgtctgcatcacaggcattacgattaacatttgacaaacgggacctcatgaaactaaagagcttctgtacagccaaggacatcatcatctgagtgaagaaacagcctataggacggggacaaaaccgtaaggttatacatctgagagagggttagtatgtagacttgacagcaaacaaaacgaaacaaaacaaaacaactccacaaaaccctagacatcaaatagacaaaacccaattaaaatccggaacatggaactatacaaagaattctcaaaggtttctacacaagtgctcgtctaaaaagttctctctaaagagtcctctctgctctctcctgctcgggctctttgcctctcctgctctgatgtgatgaccgtagtgccgtgactcccagtgctatgccctcacctctaagttcttcttgagttcagttctgactctttgtcctcagcacttcaacgtctttcagagtacgtgatcacatggtaaaagttcacaagtttacacataaattcaagccatgaatcggataagacgtttacaacacagaatgtttacatgcatacctggctaaacagccaccatctgtcaccagctctacaggttcatggagagttaaccataatatttgtgactgaggtattagtgaagttttgtatagataaacccagtcagtattttatcttctgtccttgcaccttagttccctttttaggaccttcagttaattgttttacaacctattggaatgtgctctaaggtgtagacgcctgcttgctatctcagaagcaattgactcatggcacttgaaggctggcagagttctcgttgcagtttggacatcagaaaggacttaatagcagtcctagtataaaagagcttggtgattactaatataattttaggaattcttatagggtcatcattaagaatttgtctacatagcatctatatagcatcactacaagacagtacacctttagtgttctgcagagatctgttcaaaagggtgagctaatacttagtgattgttatatatatttaataataacaggaaaagtatattaatagcaggaatctttcctaaaatgaaattcttctcggccttgcctagagaaacagttccatcattaactttcacagtccacggcagaaccatctcagcaagattacctgctagttgttagcttctccttgatggctccgggcaaagtgcgaattagaacggttttgagattttaccttaccccagtcaggatagttaagaataaaacagcagcagcaacaacaacagcaacaacaacaacggcaatggcaacaacagcagcagcaacagctgacaacctatagtggtgtggacatgggggcaggggagcacttctgacttttagcagaagtgtaactggtccagcccctgtgggaatcacagcggagggatcccacaaagctagcaacagatctgtcctgtgatccagcgatgccattcctcagcataccctgctgcagagagctgctttctcatccacattcattttgctttatgcacaattcagataatggaaacagcctggacgcccttctgctgatgataatggagaatgaaaatgtgcatagatagagtggaatgttatttaactgatagaaaaatgaattatggaattcacagataatggttggggctgtaattaattactctgagtgatgtaacccagacccagaaagacaaatgctgcctattccctcttatgtgtgaatgttagctttgacaatttagatgtgtgttcattttattttattttatttttgtgggctgacagtgtccgagacagggtttctctgtgtagccctggctgtcctggaactcactctgtagactacactggcctgaaactcagaaatccacctgcctctgcctcccaattgctgggaggtatgtactaccattgtctggcttagatgcatatttaaattagagtgcccacagaaatcaggagagtagtaagggaccctggggtattagttactttctggtattatgacagaataccatgaccaaaagcaacttggggaggttcaagttcgtagttcagcccgtaatccatcatcaagggaagtcagggcaggaagtcaagcaggagctgaagccagaaccacggcagaatgctgcttccccgctcgccctctctggcttgctcagccagctttcttatacaacccaggccaacctacctagtaatggcactgcctagagtgggctagcacccttccacatcgactagcctaggggaaatggcctcccccagttgagactccctcagatagatctgggatatgtcaagttgacagnnnnnnnnnnnnnnnnnnnnnnnnnnnnnnnnnnnnnnnnnnnnnnnnggatatgtcaagttgacaggtgaaggtgaatgagagaagggagaatctcgtagggaagggtagaatacagatgtcatgaagagggaaagaaaataatggggaaaagggggttaaagggatgagggagggcaaggtggagcagggagtgtggggaaggaaaataataggacctttgtatatgccatatggaaaagtaccactgtgcaagctttttaaaacacacacacacacacacacacacacacacacacacacacacacacagaggaatggactgactctacaaaagaagcaatgcttttcccaggtcccaggctatcaaataaaaagcctttttctagatatgggttacctcttgagctggtcagtgggagtccacaaacattagaggctacagccattgcccctggtggcccctccagaacttaatgggaaggccctgttgctgacgacaccacatacttgaactgtagcacagagagaaatcaagctggcaccagcctgggagcttcacccccactggctagctttcatggtggcatgaagtttgacaagtggcctgaccagatctcccggctggtacgatgttggtgggaatgttatgcggatgagatggcctggttggatttgagacctgctccataagatggtactcatgtttgcgctgttaactaggctaaaaccccactgacgaggtcgcaggccttagcggagagccaaatactattattctgctaaatggacatagtattaaactgccccctaaattcttaccttattcccatggattgctgcatcttctgtcatgagagaaactacccttgcagtaggtgtggattaaagcagagattcacagctggttatcatgcagagtaagagactggagtactcagctctgactgggccgtctctcccatacaacctcccttgagggtcagggagcatcataaaacagagacagaaaatgtataagagatacagggagtagatgcctgcagtgaaagattctttggtgggcatgacaaggctgctccactcatgaactcggtggtaggagctgaacctggtcttctggaagagcagcgcgtgctcgcagctgcggagccgtctctccagtcctgtgttctggatacagcactggtaactcacttccaagctctgcaactctccctgcatcccgagggcttttatctaattatctatctatctatctatctatctatattatcttaagttgtattttcatgtaatttaaagtaatttctcttgaaatttcttccttgactcaaatatttacttgtatattgtttgagctccaagtatcatggattttccagctacctttctgtttctgagtcacttccatgtgatccgaggagcccacttgtcacgatcctgccctttgacattcgcttagtgtgttttgtggcctggcatgtggttgccgtggcaatgaatggtccatgagggcagatcttgtactccttcgttagaagttctaccttgcagaattcagccatccctctgctgttctgtcccactagtgagtctacaccgctcatcgctctcttcccttcaactgactttggttttgtctgttccaagagctgtgctgacgtcactgactgtactcaccctcttctgcttctgtcagttttggactgtgttattagaagtatggaggatcaaggtgtgtgcagtccttacctggatgagaattatcatgcctttgtggagtgtcaaacccctgtatcatatcatgaagccactcttcagccctgggaacttctcttgctctgaagtctcctgttctgaaattaatacagcttctcttactccacccctcttcatgtgcatgtgtatggtgtgcatgcatgtttgcatgtatgttagggtgtgcttatatgtgtgtgcatgtgtgtgtgcacacatgtgcatgtgtgtgcacatgtgtgtgtgcacgagtgtgcatgtgtgtgtgggtgtttggaggcttgaggttgatgccaggattcatctttaatcactcttctaccttactcattgaggcgggcggagtctcagtcagaccgagagatcacggatgtggctagtcttactagccagcttgctcttgggatccccagtctctgccttctaaagctggcactacagacaggcctccatgattaccctgtatttacatgggctctggggtcggaagtttgacctgaactgcttgtgtgtcaagaactttaaccactgagaacttccggcccacttccttttggttagggttaagttggtatctcttacttcctcctttgccttttatctgtaaggtgtctctatatttaaagtggatttcttagttacagcatatatttgggtcatattttatacactcttggccttttacttggtttgtttatttatctttgagatagggtcttatagtataatccagcctgctcccaaacttgcaatcctcctgccttagcttcccaactgctgggattgcagatgagaatcaccatgccagctagttagtgtgtttagaccgttggcacctgggttactatttttaagttttatggtttgataatcccagctctctgccatctgacactggttcatgctgattgctcttcaaaatgttgcttgccttccggtatgccttgaaagttttggttaaaaggtggcatatgatgtcttgggtggaaggagctatgtaagtaagtcttttagaatacagtggcagagcatgtctagtgggcagtctacagctctgtgctctggactctgaaattcatcagtatttctcaggcttccctttgtgggtggggcaggctgctagaaagggcttcaggcaggcactcctgtcacctgtgcagaatagtagggaaacagaaggggcagctcctttatgtaaagtaggctatgctccggcactcactgttcacagagtacactggtgtgtttcacagtggttcctgtccctactccaccccatcctgcagaatcatgaggggactttcctgcgcattcccctcattacgaggatggatagagctcttggaagtgacactcggtaaagctcacctgcccttgtcttggtgactgggtttcctggagcctgactctcaggtggcctgccctgtgcctctagctgtagggctttcctgccagcactggtcccttcagaggtctccgctccagtgaagtcacctctcttacttctccagcttcgagggcaggcctaggtggtgtggcctcgcttctctgatggatctaagagctttgagtcttgctcggcttgggtttgtccagctcacttctcgatgaggtggagcgatgatgtctaagctccttcctagattagaaacttgagacgatcctcatggttgtctcattcctcgtcattgtcagttgaatctgcctttcttccgtgttggcagttctggcccaaggggttgaagtctccgttgtagcatggtatcagctggaggagctggctagagtgaggattgtcttagagtttatccatgcagcttctttgttgattgtaactacttcagaggcaagcaggcttataaatatgcttatcagttatttttaaggtcacaacattttatgtaatttacttctgtgaagcaagagcattttgaatagtgttcacctgctttagatacttgtgtagcctcccagaattccacaagacagaactcatttcgtagtggagatagacctcgttcggtagcacagacagaattcatatggtagtataaatgctgatttgtttcctgaagtcagtctgatagttttcttactgtgttaaaaccctctttggatcctaagaatctgttaaccccatggaacacgttcacactcaaggtaacagtcctgtcccattgaggggaccacaccgatctgatggttgattttgtgtagggactggagctatgctctgaagactccaggtccttcgaagcagttcaggagttccagaggttccagctgcagccagtgacccacggctctgagggccagccccgaaaacagtgggtggagaatgcatgtcccgacctttccaagatgccacctgagtccttgaaagagagtggtaagtaccaaggatatggggatagaagagagtgaggcttttcttcccaagggatgggcttgggggtggggtggggagaaaggacatacagaattcaaggtacacagtgggataaatgttggatggatgctgttattgagccaaaggttgagaagctctgtgagatgggagcaagacccgctggctggagtcatacagaaggcgctggcgtggcagtgggctgggtgctgctcacaagatggggaagggtacctcacacctgggacataactgaaaacggcttaggagtcccagcttctaaaggaagtgaaatggcaagtgcgtgccgggtgtggggcacccttggtgtgattcccagcatgacctttgggaagctgcgtctcagaaggaagtggttttagagaaccaaagcttttatctcacggattgctctcttcttcagctgtcctcacaccccaagccccaactgttccaaagatggcgagcattggagattgggaggtggcaggcaagtcccaggtaaactactgttttcttttcatgtcatcctcttcctgtgccctgcccctaactcatggcctccctagcaaagggagagagcataggctgttagcccttggcccctgggcctgctgctaattcattgacagggatgctggccccacatcacagtctgtggtgttagaagctgtagtgagctctcttaggcctggtcaggttcccaggggggttttaaagtgtcattgatatttaaggtcctctgtgtatgtgtcataggaaactccgagccccagtagacaagccaagaaggagccctgccaggaccccgcaggaggtgatcgtggggacagtgcgtgcctgggtaaggaaagctctgggtaactctgtcctggggtccagctggcctgtttctggcacactcagttccaagagaggggttgccacacgcccagaacccgagctctgccctctctggactttcaggggaggaagaagactggctccttgtagccacccatgtagagagtctgcaggttgggatgggggctgcatgctgttacctggagccagccctgctggactcatcacctcagtcagtcaccttagtccggaactggcccaggctctctgtctcaaaagttcagcacccactgagaactccccttgcgggcagactcctgcaaactgaggtcatgagaaaagcgagtagcaagggcttctaaatgctcaaagctcatgtgaccagcacacctttctctgaaggccaacgctaaagggtctgtccccagaagggagggagggagggagttcccaaaagacttgagtagacagttctcctggcccctgttacccctgctttgtgtctgaacttaaaaccaaaagacttgtgaagaggaagaaagnnnnnnnnnnnnnnnnnnnnggagggagggagggagggagacacacaaatggggtagaatagaaaggtttcaacagagtaacttgtgaaaggttaagatagatggctgagggctgcctactggacagtgggaccccaatagtgcttgctaattgaactgatcaagaaatgctgaattagagtaccccaaaaaggctttacatcaaaattcgttatctagatcacctcaaacatgtactatgatgaaaggctttctgctttgttaggaccaggcgctgctgggaaggtcttcctgtagaccagctacatttttaggatgaggacgtcctagaggatgcgatgttccaggcatgctacctgttagctcagcaatgctctagggctctacattcattcattcattctctctctctctctctctctctctctttctgtctttttgtctgtctgtctctgtgtctctgtctctctctgtctctgtcagtctctgtgtttgtttctgtctgtctctatgtctctgtctctctccctcccttcttctctctctccctccctccctgcctccctgcctccctccctccctctctctccctcgcttgccttctctctccttccctccaacagtgagttgagtctgatggggatttttgaggtcctgtgtgttttcttagccacgctgttgtgtgatgtatttcataacaacagcatggcagatgaagagccggcaggtccctttcatttttggtgatggtcctgtgtcttctaagcacccctctctaggaagatcatcacgggagtttctaattggcctcttggaggagaaggatgtgggtttcaggaacagtttagataaacacagtccgacagggttgtttctgctcaggcgtttctgtccttccttttgtgcaggagttccagcttcaaagccaagtgccacctcccagcaagagcaaggaccggagatttggggtctgagccttataaattctgggaatgggagtgctgcagacgatagcctggacagtgcgcaagacaagccagtgcaggcagtggcccaggcagactcaagggcctggggagagccgtgccaatggggtgcggaggacatgaaggtgtcaggtgttcactggggctatgaggaaaccaagactttcctggccatcttaagtgagtctcctttctctgaaaagctccagacctgtcaccagaaccgccaggtataccgggctatcgcagagcgactgagggcacggggcttcttgcggactctggagcagtgtcgctacagggtcaaaaaccttctccggaactaccggaaagccaagaacagccatccgccagggacctgccccttctatgaggagctggaggcccttgtgagggctcggacagccatcagaagaacctcaggtgggccaggagaggcagtggcactccccaggctgggtgacagcgacactgagatggatgaccaagacgaagggagctgggagcccgaggagaccgtggaagactgcagtggttctggcctggccgccgaggagtctcttcaggggcccaggattgcagggggcccagctctgctccagagccgtattggtaagaacatggcatttaactagatgaatatcagccaggctgctgcctcgtgaggttagagctcagcctgtgagtcagtaagacgccaagtacctgggccctcctcagactcactcttctctgcaccacgtctcttagttataggaacaaataactctgaagccttgccagaccgggagagattccagttgcttccaaagggtgtcgctgaggacactccgaggtggtacccgagtgatcttgtcatttccgtaggcgtgtttctcataatgcgggtgagaatggccaattaattcacagatagcaagtcttgggtaagaaagtgtgtgaaatactggcgtatagagaagaaagtgacagtgtagccttgagagtcactatgtggcaaacacctgatactgcaaagggaaagtctgtgacagccatctgaggctttggaagccacattggcaggaacagagcctggtctcctgcctggagttcatgtagcccctcccccactccacctccttgggttatgccgcttacccgaatggagactaaactgtggccctgcccgtggaccagtgaggaaagcttttccttagtcatagtctgtgccctggtcactgaagtccattgatgtctctgatccttgtggattctcaggttccaaatattgttgaagagaggattcacaaaggagacaggggatgcgtttagagtgactgcagggagaatgtcatggatgataccatttgtcagctgaagccacggggtgggtcacttgatgcagttgctaaaagcatggccagtcggcctctccttcagcaagactgtctcttgaaatggtgagagaggatgccttggccggcttccctagcatgtctcttgagtttgtgttgccaggtgcttggacagtctctgagatctgtgttctggatctgtagaagtgcaggtgaccccagtcctaatgacctaggtaaagctcctaagcctcacatgtctgaactcttcacttctgacagcaggcgtgcactggggcttcgaagagaccaaggtctttctggcaattctcagtgagtcccccttcgccgaaaagcttcgcacctgtcaccaaaacagccagatataccgggccatcgctgaacggctgcgtgcgctgggtttcctgcggacgctggaacaatgccgctaccgattcaagaaccttcttcgaagctacaggaaagccaagagcagctgtccaccaggaacctgcccgttctatgaggagatggactcactgatgagggctcggactgtgatcagagccgtggagatggtaggagaagccacaggcctccctggatctgggcagagcagtactgaggctgatgaccaagaggcctggggtgagatggaagatgaggacgccgttagacttctgactccagactcccagcctgcagatgcaggtgaggctggagccattgggtgttggcagaatctgcagccctgtacaaagatgggagctgaaaggaccaggatgggcacaggacacaccaagaccaagttctcagcacagaggagatttatttgccccagagggacagagggcagggagtaagaaacaaagacaggagatagaggatgaaggagagggtaaagaaacaaggtggggtaggggcagggcagggtggggcgggctgggggggacaagtggtattttcccaggaggaacaaaggactgcctctggatagagaggagacagatgtggcccacaggcaaatggtttataaagtacaaggggaaaccccatgtcaggataaggtatttaattttaattgggcatgttaattagatgagccaaagggagcttttgattgctggacttcaatactttgaacctttgaaccaatactggaccttagtggtcagcctcaggaggagaaagtggccaaataacagactagaccttggaggccagctttagggatgtcatggaacagtttagcaaggcagaaggagtgagagagggtcacggcctccaagccaggtttgccaggctcgagtctactagaaccaggcatatcatcttcgtctctgagccaaagaatggatgcgatccaacaggaaaagcctgtgcactgtgtagacgctgtcatacgttgtcatctgtttaagtgtcagcctgcattctgggtggctggtctagcttttactgggacacacctgggtaactatggaactgattgttgacacggggtctgcttaatgtgctggatgacgagaagagctgtttattattgaatacagacttcagaggaatgcctggggaggaaagccaggctgcgtggtcactagggtggggttactgcattctagactgatgggtggaggggagagccaggcttcatggtggctggggtggtgggtggggttactatatccagactgttcatcagcgtttcagggctagaagcacatgcttacacaaaaacttgacagcttttgcgctagtcacatttataagctgtgggctatcatatataaatctgttagccagatcgagagaatacatggtataggtgtggtagcggtaaccagcgaatgaaccgagaccttccgtttgtctgtcctttcaggatttgagttgaagcgtgaggaagaagaccagatttcagagcaggatgttttgggggatttgcctggcgccttatcaagatataccaccaaagccgtttgccagccttgtgactggggggaggaccatgtgaacggaaatgaaggggagtggaggaacacatgggaagagtgctcctctgaggaggacttagaaaaactcattgaccaccaaggcctgtacctcacagagaaaccctacggatgtgacacacgtgccaaaagcttcagtcggaaagtgcatttctttgccccgcagcggacccattcaagtgagaaaccctacaagtgtcttggctctgggaagagttttagtgaccgtgccaacctcagtacccaccagagaatccatattggagagaagccgtacagatgcctggagtgtgggaagagcttcaatgacccctctaacctcatcacccaccagagaacccacacaggggaaaagccctataaatgtgggctgtgttggaaaagctttaaccagagctcaaacctgctgaaacatcagcgggtccacttgggaggacctcccaaccagcgggatgagcccggggagaactttggccaaagtctatcatacagtgctcactggagacgaaattctacacaggagggacctaaagaacctcagaatatcagcatgggtgccgactctcctggagcctgtcaccccaactccggggagaagctgtactcgtgccctgagtgtggaaggtgcttctctaagagctctgccctcacgagtcaccaaaggatccacagtggcgagaagccgtatgagtgtgccgtgtgcgggaagagtttcagcaagagctccagcctggctaaccaccgacggactcacaccggcgagaagccgcacaagtgtgcggactgcgggaagtgcttcagcgagcgttccaagctcatcacccaccagagggtccacacgggagagaagccctacgaatgccccgagtgtggcaagttcttccgagaccgctccaacctcatcacccaccagaggattcacacgggagagaagccgtacgagtgcagagagtgcgggaagtgcttcaaccagagctccagcctcatcattcaccagcggattcacacgggcgagaaaccctacaagtgcacagaatgcggcaaagacttcaacaacagctcccacttcagcgcccaccgcagaacccacgcgggagggaaagcgttgtaggcaacacctcctcctcctcctgacagaagcaataatgtgtatctatgcctctcaagttcctaaaacactctagaaagaaaccttccgatgtttaagcttgctgtaaatctagaggtgccatctttgtaaaatccgggtaatttggaagtgaatttcagtgactaaggtttgaaggtacttccaagtgtaatttggtttgcacacgcccaatacacacatagaatccttacgatgtctttacaaatgctgtcacttgagaacttagtctgaggcagatgggtgatattggggttagagttgaatccgtggcccagcatactgattcctgtttctttctgtgccttcgctacccttcccacggaaaccagttcttgttcttcttggtagtttgcagttggagcaaatcctcacagggaaaaccttgaaaactcacagtgagaggaggtgtagactgggaactagtgcctggggtaccccatcttgaggtcagcagcaagtggggccacagcgagatcattgcagaatcattactaatagaaatagctgttcattgaacatttgctctttggcagcctgtgtgccaagcgccttatgtaacatctcatttaatcctcaaagtagtcccagcgtagaaaatggaggaggcacaattcatcaagacttgtgtgtccccagagcctgaggggctgggtgctctcctgagtcctcttacatgagggcattaatgaactctctgtcttttacaagtacagaagttgagagttcctgcaggtgagaggatttgggacgttcagaagtggtgaggtgctctgtgtgaggctgagttgttaccagagcaatgggtctgagtcaccatctttatagagtcatacgggtgagagaggtaggtagatggagacagtgtgacttgcagcgagatcgtgctttggctaagaagtgggttgaagagtcctttctcaggtcagtcctgcttctctgtacctgtggctgggcacaggtgaccatgtcttcccaaactcaacttccctgtgctcagtctcgcctgccttttggtctctctggctcagtttcttcatttccaatcccgatgcctgaggtagaaggagctgaaacattgtcctttactgagagggcttgaaaagggttccatgttctaggttcatgacacccttttagcttgagtcctcttgtcctaagctgccctatatggtctcttagaccagccactcccacaacaggctacggcagggaggcccatacacagtgcttttcttgtttgtagcactttggcctccatagtttttcttagggtttaaaaacattgaataaggactttgactttcatagatttttaaaggaaggtgactttcttacgtctatgtgtgaccttagagtgccacttgtatcccagttacttcagggctctggaagtattgatcagagaatagctgtgaagaactttgaagactggaacgttctatttgtatgtgagaaagtaggtggaagctcttgattgctgtcccctctaaaggaggtcactccctagccttcttctaggaaccggaagccccttcccaggaacgagtccactggaggctactttctgtcaactctcttcagcttacctttcctggctcatcttatctctgaggatcaggggtcatggggtgagccctggttaaagatcagcaaatgtcagttattgcagtaagaagatacgtaggataccctgggtctgaaaggaagggtcctgagggagagaagaacattctagagaaagttaccaaggtatgaaagacctgggttctaggtgaaggtagaggcccaggtttgtatcctggggtaagggactgggatggtgggagggtggcatctgggattgcacaggtgctgggacaaggtcattctgggtgcagcaatgccttcagctctttcttttcagaagttggaagctcagctgggtgggcccttaatggtgctaatctctatcgattccagcctcacattcagcacatgccttagttgtaattaaattgcctagtgctttttttctctccaaactgaacattttgtatttctttctgtctcacttgcagtttttgattgcagacccacataagagttattggtactaactatgccacaggcacattactacactgttttgaaatactccttaaaaaaaaaaggttcattacttttaaatttagctttgggcaaattcttagagcacaggcagaaggcagccagattatttgccagaatgtcacacaaacggtctcatatcccagtccctaatactttgtttccttctgaatcctcaggagctgggccctcacagtctgcatttccctcagtactactattgtcctgactcttactgttgtggcccattaagctttgcttatagcatcccatcctaaacacaaagcagagagaacaaactggaattgagtgagactataagcaatcaaagcaccaccctcccccctcctgtgatatacctttcccagcaaggctgtgcttcctaaaggttccatcaactcccaaacagcactgccactgagggtcagggattcaaatactacctgagcttacggggaacatttctcattcaaaccatcatcgtcatgtgtggatggagcctaaatggcaggctcagggtgatgtgttcagatgtgcattgtcaaagtctaacagctgattggagcttaaatgtgttgctgtctggctgaatggtaatattgcagttagaagaggtaaggatgtgaatggctacagtggttctgtggagggagaagatacctttctagggtttcagaggaaaacttaagaagagcagaggaaagcaaagggcctttcatgcctggatgaagcatccatgattccaaggggacaggatgtagagacagaaaagcagaatatgtaggcttagtctgtgacaatttgaactgggggttcctaatggacctttgagtaacaattcatttgtatgtttgagcctgaagttgggtgatagaatatgtctagagagttatatatgtgggtatggaggcaaactcacaagcaagggattatactcaaagtcaaagcagtattgtgcttaagacagaactggagaagcacggaaatgtgaagggagatccctcaaggcaatgaggaccactccccagctgactcttgtcatctttttgacactgcctcccttgtttgctaacctctggcttcttagaataatcttgtgctttctggaagttttactgtggaggactgagctccctgaggaggtgaaatggttgccgagactgttctttcctttgctgttgggactgtgctagtgcctcttgctttcagtcatggctgttggaactgtgctggtgtctcttatttgcagtcatggctgttgggactgtgctagtgtctcttgtttgcagtcatggctgttgggactgtgctagtgtctcttgctttcagtgatggctgttgggactgtgctagtgtctcttgctttcagtgatggctgttgggactgtgctagtgtctcatgtttgcagtcatggctgttgggactgtgctagtgtctcttgctttcagtgatggctgttgggactgtgctagtgtctcttgctttcagtgatggctgttgggactgtgctagtgtctcatgtttgcagtcatggctgttgggactgtgctagtgtctcttatttgcagacatggatgttgggactactagtttatcttgttttcagggatggctgttgggactgtgccagtgtatcatgtttgcagtcatggctgttgggattgtgctagtgtctcttgtttgcagtcatggctgttgggactgtgctagtgtctcatgtttgcaatcgtggctgttgggactgtgccagtgtatcatgtttgcagtcatggctgttgggactgtgctagtgtctcttgcttgcagtgatggcttctgctgcccttattatcttttgctttcttcctcttcacaagtcttttggttttaagttcagacacaaagcaggggtaacaggggccaggagaactgtctactcaagtcttttgggaactcactcaggtgatgtctgttctagaccagatccaccaccttgcctatatcccttcagaaggacttctctgcttgagtaaattggtatctgggttttaccttactctccttgggtggtagattcactctgcacagtggtggacacagttcctcagccctaactctggaaccagagtggtgtttgctgcattaggggagttttgtatttggctgaaagcaggctaatggccttccctttcactgactcagcacagagcagcagacctaaaggtaaggaaggtaagggaaacatgggcagggcttctctggagcctaaagcagtttctctcaggtttattccccagcacagaactcatagctatgacttcctttcctgacccctctccaaagcagagcaaagcagatgcacgttctggccctgtgctctgttacaggctgtagaggagagctggtgtttactgactctccggtcagggagcgaatctaaaaacaaataacctcattgccttattggtggtggtggtggtggtggtggtggtgtttgattcacaccacaagagtctgttctcttcctccaccatatagatttcagtgattaaacttgggtcaccaggctcggtggcaagtgcctttacctgctgagccacttccctggctcaggaagccagcagcttttgagaaatgaatgccatgatgtttggaatggaagtgggcatgacggatatccctttgtgctccagggtgctgccaaggtctgctatccccaacacctcccatttcccctctccctttcacttctactgtgtggatgttgatgacttggctctgtctccttcccaggcctcttgggagccagctgtctgccatccagccctgcttgtggtgacccctggcgcccacagctctgtccacctgcaccatcttcaggttctttgcctatgcagttgtcacatatatgcacactcagcagccctcatgcagcccccggggagctttgcacactcatcccggcctttgactcagcccctcagacatgatatcccctcaggtgtttcagattaggttgggttcccggctgctgggataggcagttcctaaagttaaaatgaatcatacaaaatacactttctacctcagttagatccctcccttgcatcggatgtcccttacacactccagtttggagcaagcaccgttcttattcctctcccagtctgctccaaggggtctgtgcagctgagaaggagtggttatccatcctcattacacacaccctcacacttatgagcttttaggcaatgtagaatcctcttctctacctctgtctcactgctcacctctaaaggaggaggaggaggaggaggaggaagcagagggtgttagacctcccagttctcagtgagcagccattttcccactcaatgctaacggctccccccccccccccccacttagttaaagccagagcctcaggtcagtgaggagcagctcctttctcatttattttctttctttctttttttcttaaagatttatttattatatgtaagtgcactgtaactgtcttcagacactcaagagggcatcagatatcattatggatggttgtgagccaccatgtggttgctgggatttgaattcaggaccttcagaagagcagtcagtgctcttgaccgctgagccatctctccagcccctctcgtttattttctaaatgcattgaacgtggtctggggattcacgtgggacaacatcatcgtgattctctctctgtgtagattcttgtcatgtttgttgcttattgctgaagtcatgcttactttttacatctgtgttgcaggaaaatacaccatagtcatgctacctagaggatgagggtcacaggaaggggcatttaaaaaatcaagttctgagaacagtatcaggcactcacctgagcccaagtggctgtcactgaaaactgttgtcacttaagtcttgagagttcctggtgctcaggaagtcctactttggtggcaggtggtgaatcaggagggaagggggtgtctctttccacacagaagctgggattagcctcagggccctgggcaactaacagaccacaagagaagtttgtgcagtcctaagaggcccataggaccagcaggtggtgcctcagcggcgccccctggtggcagtggtcggaagctttctacaaacccatggacccagatcaggagagggtgcctgtgtggatggcagctgaccacatctgagaaatcctatacctgaagtttctaagaaacagaagtgagactggggaggcaggggtcgcgctaaacctatctgtcagggaaatgaagtaggtacaatcagcagggatttctcggtaggctaattcctttagaaaagtagacatttgcaattgactttttagatgtgttgtggtcactgaagttagaattggttgcctcttagcctgtaagagactgactgaagaccttaactaaaacaaacaggcccttcggggctattaggtcacctggctttattttatttcattattctggctttgctttctcatttttttactattttctttcttttctatgctatgttttagagtgaggtggcctgcagagtaaattacatgatgaccaaaaggggcagggggaagaaactaggtatggattcttctagaacttctttgttactcgagaagggtaaaagtggaaggggagcgcatgttgggacttgaagaagggctaaccatggcggaatttgaatttctgccttttggcttctttatatttctgaaaatggcatcttgcttattttgccctttgataatagacagtacatttctttttacattttcacagtttcctgtttctttactacctggtgcttgtaaaggtgcacccacagatgagttctgtgagtcagatgtgcttggtgtgtcagcctcgctctgcctcccaggccgtcaaaaaaaaccaaggaagaaatcatttgcagttgcgtgcttctctgttgctgtgataaaacacagatcaacaccaacatgtaggaaagggtttgttgggagttagttctaatgctttgtcttaatttggctcccaaaagccacacttccaaatgctgagggtctctgtccccagctggcttcgattagtaataaagaattgcttggtttacagagtgagttccaggacagccacagggaaaccttgtctcgaaaaaccaaaaaaaaaaaaaaaaaaaaaaaaaaccaaaaaacaaaaaaaaaaccaaaaaacaaaaaaccaaaaacaaaaaaaaccccaaaacaaattgctttaacaaccaaccaactgcagggcagggagatggaggcgggacttttagattgtgagggcaaggatgggactgaggggaagaagagaatcacatgactccgagggggggaaaatcatcatccagcaatgtagggagaaagggaaagcagcccggggtgggggggaggcttcccagaaggtaacagggcagcaaagatatagatttagaaggtattaagcaaggaataacggaggggagtgtgtgctagccgcagggagatctagaagtgcccagccattgagctagtcaagggcatatcaaagttagatggcctgttgtatgactttcattcatgaacccagatctcatgggtgggggcagcatgcacaagacccatcaggagccaaagcagctaactaatcaactgctaaataaactgggtttttttagcttatacttccatgtcacagtccatcactgagggggagtcagggcagggactgatgcagagaacacgatggaggaatgctacttactagctgcctcccactggctcactcaattgccccttccttacccagcccaagtccacccgtccaggggtggcaccatccacagtgggctgggcccttcttcatctattagcaattaagaagatgcccccacagagatgcctacaagtcagtccgacggaggcaatccctccattgaggtcccctcttcccaggtgtgtcaggttgacagctgaagctaatgctgagggtttattttggctcacagttggaaggtacacccatcgtgtcacccatcatgtcaggaatgtcacagcagcaggagcctgtggcatatgcagtcaggaggcagaggatgggagtgtctgtgctcagctcgttatgtctttatatggtctaggatcccttcataagggatggtgctacccacagtgggcgaatcttcccatctctcaacgtgatcaagacaatccccaacgagcatgcccagaagttcatctcccagataattctagatctcatcaagttgatagttgaggttaacaatcctagctggtcttttagaaacatttctaaacgattctgcatccctggaagcctttcaaatggtggcttctcgggtctcagagctgagccacatgggagggacacgggttgtggagttctcctcacacactgttgtgtctgctccccacacactgttacttctttgcttccctgttgctttggtcagtcacccagagatcttacctgggtgaagaggactggtgtgcaaagaccataagttcagcctcagccaggtgacgtggtcaccccactgagaggcccaggttagtaccttgctttaggtaatatccagctgctatacaggaaagcctgaaaacaaaagtcagatgcagtttttaggccccagggccattctccagaccagcattccatcccagtgtcccttggcatgttctttgtgtttcccagcatccttcctctgcctgagtcagctattgtccgctgagcatcctcctgcagctgcccaggtctgcttcccctggctggttttccttctctgcatccagttctggctgtcaccctgaatggcttggatgttcacaggagctcaaggtggcattgccatctttgacaccacagccactcactcaaagcccgggccttgaaccctcgacccccagcatccacagttagtgtaatctggactcttgtctctctcaagcttcagattttctcagctggttacctggcatctcctctgggtctcagcatgactgtgtggatttaagcctgccttctaaccctccatccttctttgtttcatccagtaaagagtgtcacccatccagacatctggcaggcacgttagaacctcttctcccattgttttctccatccactcaaccatccctgtttattctcaccaccactccttccaccctcactgtgtttaccctacccttacccagttattgccatcctgaacctaattgttgccccttaacccagttattgccccctaaacccagttgttgccccacccatacccaggtgctgaactgatacatctgccaggttctccttagctcacgcttctctcacattgcagagcaaggtaccaccaccccttccttcctgttatggatgtgtgatttgcccttgttttctgtcacactctcttctccacaattcctcctgctctgactactttggtctctttccgttcctcccacagcctgggaccctgccaggctttacacaaaccggtccagctactggaatgcggatcttggcactcataacctggccaactcccaccatcatctttcaggtctcagttgaaatcacagaaagtcaggccctaactcccagctgagttaggtcaaccctccctcccattactttccttgtagtctgtcagtacatgccagtacatgttagtacatgttagtacatgtcagtacatgttactacatgtcagtacatgttactacatgtcagtacatgttagtacatgttactacatgtcagtacatgtcagtgcctgtgccagaccaggttgggctccctgagagcacaatgattttgttcaggggaacttcctctcatgaagccagtgctttgcacgacccagcagagagacagaattggggatccaagctaggctgatcttgatcaaaggtgatatctggctttcctaagcctcaggttggtctgagccaggcttccttcctcttctccactgcagagagaagtgtgcctctctccttcattccgtctccagctcaggcataattcagatagggttaccaacagaacaaaacctcacacgcc

SEQ ID NO: 923 - DNA, 3317 bp, Mus musculus
atggctgtggcctcacctccgccagagccggaagacctcctgattgtgaagctggaggaggactcgtggggatcagactccagacccgagaaggagagccacagccccgtccctggccccgaggtttcccgccggtgtttcaggcagttccgataccgggatgcagctggaccccatgaggccttcagccagctctgggcgctctgctgtcgttggctgagacctgagcttcgcctcaaagaacagatcctggaactgttggtgctggagcagttcctgtccatcttacccagggaggtgcagacctgggtgcaggcacgacaccccgagagcggagaggaggcggtggccctggtggaggattggcaccgagaggcctgggctgccggacagcagggactggagctatgctctgaagactccaggtccttcgaagcagttcaggagttccagaggttccagctgcagccagtgacccacggctctgagggccagccccgaaaacagtgggtggagaatgcatgtcccgacctttccaagatgccacctgagtccttgaaagagagtgctgtcctcacaccccaagccccaactgttccaaagatggcgagcattggagattgggaggtggcaggcaagtcccaggaaactccgagccccagtagacaagccaagaaggagccctgccaggaccccgcaggaggtgatcgtggggacagtgcgtgcctgggagttccagcttcaaagccaagtgccacctcccagcaagagcaaggaccggagatttggggtctgagccttataaattctgggaatgggagtgctgcagacgatagcctggacagtgcgcaagacaagccagtgcaggcagtggcccaggcagactcaagggcctggggagagccgtgccaatggggtgcggaggacatgaaggtgtcaggtgttcactggggctatgaggaaaccaagactttcctggccatcttaagtgagtctcctttctctgaaaagctccagacctgtcaccagaaccgccaggtataccgggctatcgcagagcgactgagggcacggggcttcttgcggactctggagcagtgtcgctacagggtcaaaaaccttctccggaactaccggaaagccaagaacagccatccgccagggacctgccccttctatgaggagctggaggcccttgtgagggctcggacagccatcagaagaacctcaggtgggccaggagaggcagtggcactccccaggctgggtgacagcgacactgagatggatgaccaagacgaagggagctgggagcccgaggagaccgtggaagactgcagtggttctggcctggccgccgaggagtctcttcaggggcccaggattgcagggggcccagctctgctccagagccgtattgcaggcgtgcactggggcttcgaagagaccaaggtctttctggcaattctcagtgagtcccccttcgccgaaaagcttcgcacctgtcaccaaaacagccagatataccgggccatcgctgaacggctgcgtgcgctgggtttcctgcggacgctggaacaatgccgctaccgattcaagaaccttcttcgaagctacaggaaagccaagagcagctgtccaccaggaacctgcccgttctatgaggagatggactcactgatgagggctcggactgtgatcagagccgtggagatggtaggagaagccacaggcctccctggatctgggcagagcagtactgaggctgatgaccaagaggcctggggtgagatggaagatgaggacgccgttagacttctgactccagactcccagcctgcagatgcaggatttgagttgaagcgtgaggaagaagaccagatttcagagcaggatgttttgggggatttgcctggcgccttatcaagatataccaccaaagccgtttgccagccttgtgactggggggaggaccatgtgaacggaaatgaaggggagtggaggaacacatgggaagagtgctcctctgaggaggacttagaaaaactcattgaccaccaaggcctgtacctcacagagaaaccctacggatgtgacacacgtgccaaaagcttcagtcggaaagtgcatttctttgccccgcagcggacccattcaagtgagaaaccctacaagtgtcttggctctgggaagagttttagtgaccgtgccaacctcagtacccaccagagaatccatattggagagaagccgtacagatgcctggagtgtgggaagagcttcaatgacccctctaacctcatcacccaccagagaacccacacaggggaaaagccctataaatgtgggctgtgttggaaaagctttaaccagagctcaaacctgctgaaacatcagcgggtccacttgggaggacctcccaaccagcgggatgagcccggggagaactttggccaaagtctatcatacagtgctcactggagacgaaattctacacaggagggacctaaagaacctcagaatatcagcatgggtgccgactctcctggagcctgtcaccccaactccggggagaagctgtactcgtgccctgagtgtggaaggtgcttctctaagagctctgccctcacgagtcaccaaaggatccacagtggcgagaagccgtatgagtgtgccgtgtgcgggaagagtttcagcaagagctccagcctggctaaccaccgacggactcacaccggcgagaagccgcacaagtgtgcggactgcgggaagtgcttcagcgagcgttccaagctcatcacccaccagagggtccacacgggagagaagccctacgaatgccccgagtgtggcaagttcttccgagaccgctccaacctcatcacccaccagaggattcacacgggagagaagccgtacgagtgcagagagtgcgggaagtgcttcaaccagagctccagcctcatcattcaccagcggattcacacgggcgagaaaccctacaagtgcacagaatgcggcaaagacttcaacaacagctcccacttcagcgcccaccgcagaacccacgcgggagggaaagcgttgtaggcaacacctcctcctcctcctgacagaagcaataatgtgtatctatgcctctcaagttcctaaaacactctagaaagaaaccttccgatgtttaagcttgctgtaaatctagaggtgccatctttgtaaaatccgggtaatttggaagtgaatttcagtgactaaggtttgaaggtacttccaagtgtaatttggtttgcacacgcccaatacacacatagaatcct

SEQ ID NO: 924 - protein, 1011 aa, Mus musculus
MAVDPPEPEDLLIVKLEEDSWGSDSRPEKESHSPVPGPEVSRRCFRQFRYRDAAGFAFSQLWALCCRWLRPELRLKEQILLVLEQFLSILPREVQTWVQARHPESGEEAVVEDWHREAWAAGQQGLELCSEDSRSFEAVQEFQRFQLQPVTHGSEGQPRKQWVENACPDLSKMPPESLKESAVLTPQAPTVPKMASIGDWEVAGKSQETPSPSRQAKKEPCQDPAGGDRGDSACLGVPASKPSATSQQEQGPEIWGLSLINSGNGSAADDSLDSAQDKPVQAVAQADSRAWGEPCQWGAEDMKVSGVHWGYEETKTFLAILSESPFSEKLQTCHQNRQVYRAIAERLRRFLRTLEQCRYRVKNLLRNYRKAKNSHPPGTCPFYEELEALVRARTAIRRTSGGPGEAVPRLGDSDTEMDDQDEGSWEPEETVEDCSGSGLAAEESLQGPRIAGGPALLQSRIAGVHWGFEETKVFLAILSESPFAEKLRTCHQNSQIYRAIAERLRALGFLRTLEQCRYRFKNLLRSYRKAKSSCPPGTCPFYEEMDSLMRARTVIRAVEMVGEATGLPGSGQSSTEADDQEAWGEMEDEDAVRLLTPDSQPADAGFELKREEEDQISEQDVLGDLPGALSRYTTKAVCQPCDWGEDHVNGNEGEWRNTWEECSSEEDLEKLIDHQGLTEKPYGCDTRAKSFSRKVHFFAPQRTHSSEKPYKCLGSGKSFSDRANLSTHQRIHIGEKPYRCLECGKSFNDPSNLITHQRTHTGEKPYKCGLCWKSFNQSSNLLKHQRVHLGGPPNQRDEPGENFGQSLSYSAHWRRNSTQEGPKEPQNISMGADSPGACHPNSGEKKCPECGRCFSKSSALTSHQRIHSGEKPYECAVCGKSFSKSSSLANHRRTHTGEKPHKCADCGKCFSSKLITHQRVHTGEKPYECPECGKFFRDRSNLITHQRIHTGEKPYECRECGKCFNQSSSLIIHQRIHTGEKPYKCTECGKDFNNSSHFSAHRRTHAGGKAL

SEQ ID NO: 925 - DNA, 42811 bp, Homo sapiens
aagtctgtcctccaggaggacaggagcgcctaggtggggctggggagcactgagtgtatggaaaagggggtggtggagacagggggtccggagcctgtgtgaggagaaaggagccgctgagcttggagggaggggagacaggtggatggagacagaaagagaaagggccctccagaaggtggcccggaccaaagcaaagatgtctgttttcatttcattcaatttattattttgtttatttgcaatgctggtttctcagttctctttctttccagaacagttctctctgggcagccctggccagactgcagcatgagaattgatctgacctcagcctccttctgtaaacttctcacgctagcctcgggtggggatggtgcaaacctagtcctctgggtgtgtgtggggagcgatgggcaagggggctacaggtgggtcttctgggctctaagggctacatttggcctctcaagtttgagggtggatctatttgctgctatgccgacactccatccccacccagcctgaccatgaccctgggttctcattccagctctgccacctgccttctgcttggccctggaaaatccccttcttctgtctgggcctcagttttcccatatgaaaaggaaggcgttggactagatgaactcagagggcttttatggctcaggcagtctgtaagtctcagacctctgaagggtatgactggggaaaggaaagaaacatgaacaggagtcccaaaggatttcccatcaaacactgcattcccctacacccctcacttgggaaattagggtaaagcaaatcaatctcctggctaccattacaaggagaatgaggcagtcccattcaagtatttccttcctttctgcttgactgcaaattccactcttctcactttaaaataagtaaaagccaggccgggcatggtagctcactcctgtaatcccagcactttgggaggctgaggcaggtgaatcatctgaggtcaggagttcgagaccagcctggccaacaaggtgaaaccccgtctctactaaaaatataaaaattagccaggcatggtggtgcaggcctgtaatcccagctactctggaggctgaggcagaaggatggcttaagcccaggagtttgaggctgtagtgagctatgactgcactactgcacttcagcagagcaagaccctgtctcaaaaataaaatagaatagaatagaataaaaggtactcccaaagggaaaggagctacatatgcccatcttcttccataaactcatcaagaatataagtcccacttcctcccagaggagttgtgaaggggtgaagacaaactagagggttatactaacggatgtcccttcacatggaagaaaacatcagaagtgggtaacacgcattctcccctaaccacacagttctagacatgtatcataaactcagtaagtttcatacagactagtgggtatttaccatcactttggctgccctgcatctgacgattccatgagataccccaaaatccttttcacaagttccttttctgctttaatcagttagaatcagtttctgttgcatataacaaaaccctgactgatgtagaaatttgtacaagaaatggttgtggacaagagaccctcaggaaaagagggggaatctgaggattggttatttgggcctgttgggactgagggcagtgaaaatccagcgtcagacagtgggattctgacatattgagcatacactggtgaaagaaccaagttaaaatttctagtcacctggaatgaagtgccccttgaaagcaagcctctaagaggcagagtggccatcgctgtaaggtaatctgagggccacaaagatttcaaggggccatgaggcaggatggttgcttctagttatactgtataggttcatatcataactcctcaactaaagtgtttacctaaaagctagggagcttttataactgtggctgaagaatctcaagttgtttttttttttcacccctgggaggtgattgaattgtgggagaaggcccctcatgaatggtttaccatcatcccctgggtgatgagtgaattctcgctctaagttgactgagatctagttctttacaagtgtgtggtcatagagggaaacaacagacactggggcttacctgagggttggcgggttgagtggggggttggtggtgggaggagggagagaatcaggaaaaataactaatgggtactaggctgaatacctggaggatgaaataatctgtacgtcaaactcccatgacaccagtttgcctatatgacaaacctgcacaactattcctgaacttaaaataaaagttaaaaaaaaaaaaagcatgtggcgtctctcccttctctctcgctcccagtgttgccatgtgacactcttgctttccctttgcctgtgaaaatgtagcttcctgaggcctcaccagaagctgaacagatgctggtgccatgcttcttatacagcccgcagagccatgagccaataaatcctctttataaattacctagtcttcggtattcctttataccaacgcaaataatggcccaatacagggcccttccttccttgctgcagcctggaagagcaggaatggagccttatagtcttctgaagtttgggctttttggaatcttccatttggaacactgcaagatatccaagagagcaacatttcgatgtattattttgcttacaagacttctgctttttagaaaaccctgatttcttcccactttctgttaggagtaaggagagcaagtagtaatgagggatgatgaggagtgaaagcccattctgacatccatgtgtcatttgcagcaatcttatgaagcaggcagtagtatatttattttacagatgaggaaactgaagtttagagaggtgaagtaccgtgcccagaataatgacagagtggttcctagacctgtgatcccaagtcttgtgctcagaaacagtgcttgcttcctttttttttttttttttagatggagtttcactctgttgcccaggctggagtgcagtgacatggtctctgctcactgcagcctctgcctcctgggttcaagcgattctcctgcctcagcctcccgagtagctgggactacaggagcctgtcaccacacctggctaatttttgtatttttagtagtgatggggtttcaccatgttggccaggctggtctcgaactcctgacctcaggtgatctgcccgccttggcctcccaaagtgctgggattacaggcgtgagccaccttgcccagcctgcttgcttccttaaaacagagaagtgagaccgggaccccatctcaccattagtctgcttcttctttttcctgacccttggaacctcagctataagtatctccttgtcccactcttccattcaactccctagcagttctactgttggtcctttgaccgtggcacactgggggccgtgtatcttttcactgttgtgagtattgtgtatgtgtattttggagggggaggatagggtctggaaaagggaaggggatagagtgggattctgattctgcttctctgtggactagacttggtgctgagatggacaggcacttgctgttgcctggtctgctcctgtcccttcctctgaccgcaggctggaccatctccaatagtttagtgactgaaggctcccggctgtctatggtctcccgcttcttcctgatttgcctcttggactccagcctgcctttcctcaccacatgcctctcagtgatcaacttggtgcgggccttggaaactgtgctgcagaacgtggagggtctctgtcaatctggttccacttctgctctgcctcaggatgccttctcccgctttcctgggctcaaggtcctggggctgaatctgcatctcacccagctcctgccaggagctctctgggggttggggcagctgcattatgtctttcatagctcccaccgtgggagcattaatcttcctaccgctgatgcctttggtgacctgagatccctccaggaccttgctttcttgggttcctgcctggatgggagcttgggtgtccggttgcctcccagtctgtgatggctgtcgatcaggtgtaatttccttcagaatgtgggggtgctggctgatatcttcccagatctggtgcatggcccctcctctggggatgcctgggccttggacatgttggacctgtcattcaatagtaggctgaagctggccagtcctggagccttccaggtcctcaagctggggactctgaatctggaccacacaaagatgaaggcagatgcactggtgggacgggggctgcagagattggatgccctgtgacactcactgacatggctgagctgcctgccaggatggttgcccattttgagcttcaggagctgaatttggggattaatcggacaaggcacatagccctggaaggcctggcttcctgtcacagcctgaagagctcgggtcttcggagcaatggcctgattgagttaccacgaggtttcctggctgccatgcccaggcttcagagactgaacctggccaacaaccaactgaggagcgccatgttgtgtatgaatgagacagggtttgtgtcaggattgtgggccctggatctgtccaagaataggctgtgtaccctgtccccagtcatcttctcctgtttgccccacctgcgggagctgctacttcaagggaaccaactggtttgcttgaaagaccaggtattccagggcctacagaggctacagaccttgaacttgggcaataatccactggtaaccctgggtgagggctggctggctcctctgcctacactgaccacccaaaacctggtaggtactcacatggtgctgagcccaacctggggcttccggggcccagaaagtctgcacagcttgagaatacagtttccctttggccctgcgggagtagcattttccctgctcacaagactgactagcttggagctccacgcagtttcaggcatgaagcattggaggttgtctcctaatgtctttccagtcttgcagatcctgactttaaagggctggggactgcagctagagacccagaatatctccaagatcttccctgcccttcatcaactctccctgcttggcagtaggttggagcccctctgttcccaggacacctccagcttcttcctctggcagctcccgaagctcaagtccttgaaggatggggaaacaggcatagccctaggccctactgcatcacgggactgcccagtctacaggagctgaagctgcaggcactgcagtctcaagcatgcccctgcccagtgcggcttgaggagctggtgggtgagttgcccaggcttgatatgctgcagctgtcccaaacagggttggagacactgtctgctgctgcttttgggggcctcggcagtctccaggtcttagtactagacagggagaaagacttcatgctggatgacagcctccaggagcacagtcctcggatgccccagtacatctatattctgacctcatccttggcctgccagtgtgccaatgcctgcgtggggccctggctttagcagtcccccagaacatacatgcacatagtatcacagcagctgtgccattcagaagctgggggccactcaaagaatctctttttcccttttctctggagccactgccccaagactttggggttggagctcttttttgcgcagctctgccctgctgcttctgctggtctccttgcccttcctaaaggaagccaggaattcctggatcctctaactcaaggccttgctcagggtttggttccagagtctgaggagtcagaagggtaaaggcaagaggttcctctatgacgtgtttgtgtcccactgcaggcaagaccagggctggatggtgcaggagctgctgcctgctctagaggactgccctccagctggccgggggctgccactctgcctccatgagtgggattttgagccaggcaaggatgtggctgacaatgcagcagacagcatggtgggcagctgggtcacgctctgtgtgctgagtcaccaggccctgcacaccccctgctgatgcctggagctcctcctggccacctcctttctgctggctgtcccccaccccccaagggctactgctggtcttcctggagcccatcttacgccactagctcccttgctgccacagattggcctggttgctccgctgaagagactattgcatgtggcccaaggaagaggaaagaaagaatgacttctgggcttggttagggagcaggctggagcaccctggggtagggtagaatgggtgcgtgtgtgttggaaggtgggggtaagaaaagcaagccagcttggcagggagatagtgagtatgtgtgggctatgagactgaactcagtttttagtagaaggtggggctactgtgtgtgcaagggagaatcaaatgggaacacaggctttgggaaggctctggaggctgaataagaaaatctgggagatggcaggtggccatgtggtacgtaatgtaatctcaagatctccaaaccctcaataaatgtactaaatccatgaatgcttggcttgattgaattttttttttttgagatgcagttttgctcttgttatccgggctggagtacaatgaggcagaaggtgaaagggttggattcacagaaactgtagtccagaggaaataaggttggaaattcatggagagagagggcaaagagagaagcctttggccagtcctaagctgtggaatggggtccaggtcaagttcaaccagatcttcaaggggccaagggaccccttttgccatctgggttatagagggattggcagctaaggatcaaaaagctgggatgctgcccaggagacagcagactgattgcctgttccctcaataaaaaacatgaaggcctgttcccatctatctccagttaagcctcatagcaacactgggaggagaagcctacccccttgtcactctgtactctgactatgctagactacctgtgggtcccaggacatcatcacaccttttgtctctgggccattgcatatgctgttcttgcactgaaaaataccttttccctggggaactcttaagtattatttaagatgcagttcagccatcactttcttcagaagcctttcctgatctcccagcctagataactgttgcccctgggctcccacaatttcctgcacctccctttctcaaaggactgatcacaggcctgaaagccacagaaatagtggtctccaaagctgagtgcacaagattatcacactatggttgcaaagaaactgttataacttctatttctattttttaaaaatcttaccttattctgaagctagactgcctgcttttttagccacgtgccgttagcatgttatttaacctctctataccatagtttccttttctgtaatatgggatagtgttagactctccctcaaagggttttggatgtattaaatgagttaatacatataaagcactgagagaaggacctaataatgcattgcaaatgttcaaggaaagttagctattacaggcacatcatttataagtaaataaatacacatatgttgggagtgtgtgctcaactcaaaaactcaaaaaggcttcacttatgggagcgctctattgggaaagtttagagatcaggccctggggtcagagaccaggtttgcttcatctctgcatccttagagcctagtgtctgcccaaatcagagagagtcctggtagacaaatgcagacagaacgcttgcaaaccaaatcctgatgggtgctgaaccagagagaacctggaacaggttcaggctctgttgcttatttctacacggcactaaagggcagttggcctcttgaggacttcgttagttttttctcttctgtagaatgccaggctttaattagacaaaggctaagggaaaccatagaataattcgaggctgtattgagggcgaggcgcgccctcttgtgtcctaatgatgtcctctcctctctctgcacactcgcctcccttcttcctcttagggcagatgatgctgaagtggacacgtccttacctgaccctgcaaagctgcctctccagcttcagatcctgacactctctcaaatgtttccggctcccttggcaccccacactgttgcactgtccctccccatctcaaaccctcctacttccacatatggtctcttcctcatgcagtgtaggacctttggagtcacatgcctagggggtgacaaatcgcagccctggttcttattggctctgtgatcttgagtaggtcacttcgtttctctaagtctcattccctctttgtaaagtggagcaaacaataccaatctcatagggctactgtgagacttcaacaccaaggagtatttacgggttgttattatgtttactgagtaaaatcacatgagttattactacaaataagttggaacatgtttcacagagaaggaatttaaactgggtcgttaaagctaagaattctcctattttaacactagccaacatgcattgagctcttaccagatgctaggtattgtcaattttccctaagccgcataaccattggtaataataataatagctaatgattatgtatattattgtattttctattttttaaaatagagacgaggtctcacttcgctgcccagtctggtctcaaactcctggactaaagcgatccttccgtctcagcctcccagagggctgggattacaggcatgagcctccgtgcctggactagctaatgattattaaacactttctgtgtgtcagacatgtgtcacgctctttacataccttctcccatttattcctctcaacaaccgtctcaggaagaggcaagtattatcattcccattttacagctgggaaaatgcaggcataaagaagctaagtaatttgcccaaggtttcacaacgcgggtggtatgacctgcatccttcatttgaaagtaagaactttcagacacaagcagcttgacttcagagacttttacctaaatagtctcatttaaccttcataacaccctgtgatgtaagttctcttacattacttgcattttatagatgaaaattccaaagacaaaatagatggcagtaatttgttcaaggccacacagctgcgaagtagttgagttgggatttggatccatgtctgactacaaagcccccattctcaacaccacattagattgttcatgccccaaagtattcacagtggtacagagcacccgcatttatatgaggattattttgtaataatgattaacattcttccaacacctaggaagtgccaagctctgtactaactgatttacataataatagctaacaatcgctgtgcattattaggagccaggccctgagctaatcgttttaggtgtattatctcattgaaagttcacaaaactctgtgacatggatgccattactaccctcattttatggttgaagagaacgaggttcagaattcttccaaagtcacacagcttagctgtaagctggaaattaaagctacaactgtccagttctctcctgcctatcgggctggtcacctctagtcattctctcttcttatttcttattgtgtctgctttgatctttcagggtctgaggctctcacttcgacccctcagtagaactgggcccccttctgctcgagtgccctcccattgggcggtgctgttatccggaagcctatggaaaaggccaggatcgcaacaggtcccgcccccatgtgtcgcgcccgttccgatttgttccagtgccagggtccgttagaagatgacatatctattggctgaagacgtctgaaaggcagcaaacggagggggccgcccccggcgctcgcgcggttccttctgggaattgtggtctcagacgttccattcccagggtggcgccgctcggactccgcgtcccagcattccccgcacgagcccgggagcacttccgccctgttgtgaagtgggtgtctcggtgggtgagtccgggtggcggggcgggggcagctgagacgcaggctctgggctggagacttaggaggtggtggtgacacagggggctggggaaggtgagaggggagaaagaagcttatatgtgggggtggagggtgagggacggtcaaaggatgtagaggccggagatgggaagggtcatacaggggtcggggatgaggaggcgatagagggccctgggaatgaggagggccttagaagggtctgaaggtgagggggttgagggaggttttggaggtgggagagtcatagaaaggtctggagaccacagaggaaaggatagagggtctggggccctggcaagaagtgaagagggcctgagcttgaagcccgaccttaaaaatagtgtttcaatctctaccttcccatctagaacaagcatatctaatttgttacctccctaatgattgttacctctggaacccagtggatgggactggctattgtgttctgccccaaacctgcacttctttccttatgtcttatggaagtcagtggcacgatcatcccatttacctacctacctacctacttacccactgattcctcttgcattcttccacgtccaaggatcttccgatctttaatttctttaatatcttttcagtcggcctctttcttgtagggttttcgcagaagccttttcagtttcccagcatgaacacacacattgcacctagtgtgatctgtttcacctacaaatctgattatgccttctgcttgaaaactttcattggcacccagcacctgtaaagtccaaacaccttgtccttcataaactccttttgcagcctaatcttcatgcacctcacactccagggctgtcaaggttttcctcgtttcctgggtaggccatttggttttccatcattatatatgctgttctctcagcttagaatattctctccttgcccttcaccttctttgccaagagaacttctttaacttaaaaaaatttcaactcttactttgctcaattcccttaagcaaattaagtcacccccaaccctcagctcccataacttctcctattaccacatttgatcataattatctgtgaagtgtgtgtctcttccattagactgtgaacatctccaggacaggaacagtgtctcaatcacctctgtttccccattgcccagtctagagcagtaaacacttgatgtaaagcagtaaatacttgatgtatgtatgtgtgaatgaagaccatgcagggtaagctttgctataccagccttgaagacttctattgccagtggatttccagggcaggagctttagtcttcctctgcctggcaaggctatctgctggaagctgaagctgattcattgccaatgggagtttaagccaggggtgacaaatacatggaatgtgtgctgccagtgccccttcctgtgtccctggcagtcatggctaattggttggttctcagcacatattcacactgtactcagagccctcagcacactactctaggcagccacttccagttgattgaagtttctgctttaaatgaaacctatttgctctccctggcttaagcccttatgtgtgaggtcaggtcagactgctttaagccatagcttggactgtcagccaaatgggcctgacagcctttaagagttcccagttttttctctttggaggtcacagaccagtcttggcctttcctgtggaactggagagcatcttctcttcccttttcactgagtgggctcctcatgaccacgttcatacttactgccctaggagtcaagatgcccctcagcttccctgtgtttgtaaagacatcttgattttgatggcagtcagcacttatccctcatgacctgggaggctctgtactctttctaggtctttctggatattggaagagagctttgagatcacttagctgaatctaagtggcaaagcgacagcccatgctgaatgaagtccaccatcatgctttatttaatctcatagtgtgtgaaaaaattttgagttggttaccaacatttaaaaatccagagtgctagtttcttttggaaaaatcagcaggcttaggaatattctgggcatatgttcccctggcactctatagttggctgtagtgcccacccagttcatttcagtcattgactcatttacattgctaggtccttatacccatttaaacttgtagccactgactctagtctcccttctcccttgctctaccccatcatactaattggggaacctagggcaactgctgagtaagatcaggctgtaagctgcagcctagctaggcagccacaggggctacataacttgtccaaagtaacacagctgattagtggcaggagtggaactagaaccccagtctgctcactcctgccttactgttctttccattctcccgtactgtcatcttaagagtttggatgactagcacacatagaggaggctataagacatggttaagaaaaatgattggagaaaagggatctcggcttagaccctaactctaccacttgctagttgtgtaaccttaagtgaatcttcataaacactcagtttccctttaggtaattgaggatatagtgcagtcataccttatcagataataatattctaagggtgaaaatcactttagccaaaaatcacagttagtttgaaaatcctttggcaaggagccgtttcagaaactaacacgctgcctttcaataaataaactaaacagcacagctgggctttcttgtttgaacattagatgagaattcgcttgtattagggactgtgcggtatgaaagacactttactcacacttagtggaaagagaggcacgagggaatcaagaccaacctggtgaatagcgaagtcctaggtgccaccaccacatgcttattctcgaacagatagtgaacgcaactggctgcactatttaaatcatgctctttctctctttcttttttttttcttctttttctgagacagagtcgtgctctgttgcccaggctggagtgcagtggcacgatctcagctcactgcaacctccgcctcctgggtttaagcaattctcctgcctcagcctcccgagtagctgggattacaggtacgagccaccacgcttggctattttttttttttttgtatttttagtagagacagggtttcaccatgttggccaggctggtctcgaactcctgaccttgtgatctccctgcctcggcctcccaaagtgctgggattacaggcgtgagccaccgcgcccggccctctttctctctttctgatctttgcagtggaagttacagatcagtgaaatgcagctcaacacctaatgagactccagttgctgcctggaggcttcagtgagattatgaatgtggaacacagcactgtgcctggcaccttgtgggcactcagtaaaggggtactcttagaaattgctggtcctaatgaggctcgatattcctggtcatctcggaactgaggaatgccccggtccattttcccttgttcacttctgtgtgaagtcacccggctgttggccgactctgttggcctccctctccccacaatagcctgctatccatacttcggtctaacttccttagaaagttacggttatggttccttagaaaaaaaaggttatggtgatatgtggtccctggggctttccgatttctatttgaaacaaacctttgggactttcaagtctttccaggagaaaatacctattatctgagactctgagctttgggcctggtgtgactgctaattgcctattttgttgtagtgtcctgtttatgcaggaacgcaaatgtctttgcttgcttattgactgtctgtctcactagactgtaattttattgaaggtagggactgtcagtcccagctactggtagatctgtagcttccaaacagggtatagctggtactctataaatgattgatgaattgctccttgtgtgagagggtgacagaaatgtgtttgaactcatgcatcaataaggttgtggttcaaaaagaaatttcatgaaaggcgaattctttaggttcaaaaagaaatttcatgaaaggcaaaatctttctacatatgtgatctctctgagtgcttatagcagtaatgtaggtagacagaaatagtttagtttaatataaattatggaatatctgtatcccattaggcttttgatacgccaggtttatcattttaatacatggtaataaaactttttaatggccctgctatttatcagatactgggttgagcactgtggatacagaaattagtaacatacaatactgattctagtaatatagtataatgtgggtgtcagatatagtaacaggtaactacaatagtgtaggataatacctatattagaggtatgtaccaattgctttggtgatataggatcagggaggcaattcttggagggcaggacatgaaaagggcatgtcaaggaactcctatcaaaggaggtgacatttgagctggtggttgaaggatgagtaggaagctgccaggtagccatgagttgtgctttaagcctcttcctaagcatatggaggcctttagggcaagactttaatttttattacccttgtcttgtttctcttcagtccagtcagattgcccaaaatgaaaaataccaccatctctccattctcaattcagttgtgtcattcccacttggaagcagctaatgatctcctttgagtgggcattttttatgtcacccagacttgttgggatgacacagagagctcattttttcaaataacccagcatgggtgccatcagagaggctgtaatctcctctgggacacacatagatacgcacatccttctcatacaatgtctcatacagtgtagaaagtggtaagtgtcacagagacatggaaataaaagagaaaggaattccttttggcatgagcgcgaaggtcatttattttttatctagtgtgcacagaaagggattaattgcaatccttgcttaatgacacaccatcatcattagtcaatcattcatgactttattatttattgagtacttcctatatgtgctgagcactgtgctaggtctcttgggaagctaatgatctagtgggtaagaaaattacagtaaagcatgatctgggctatggtagagaaaatgtaagatgctatgggagcttgtggtcgaggactgaatcttgtttcagggtgcagggaaggccttacggaaaaagagcaatttaagctgagaccttgctagctgaaggaagggaggagaccattcccaaaggagaccttcccaaagaggggaaggttcagagggcagcgtggtgtaagatctggaagctgtgcttctggagcaccatgactagtggagcatggtaaagagacgagttggagacttgggtaaggcttgtgctttgtcctgagggaaatggtagatcactggagggtgtttagcagggaggtggtgtagtcaggctttgatctagtttggttgttgtgcaaacaatagagcagaggttggggtgaggtgagtggaggcagggacgtgttaggagactgatcaggtggaagacatgatgattctctgcactgaagtggtagcattggagatggagatgccaagtggacacagcgtggtgatgaattggatttgggggatcttagagaatgatgatgaccaggtttctggtgtggagaacttgatggcagtgccttcactgaagggggagcttcagaaggcagacatgattgcaggagaaaataacaaatccagtttttgactcattgagtttgaggtgcctaagggacagtcaagtagaagtgtcatgaaggggtttggattttggggtctggaggtctggaaacaggtccttgctggagttttaggagtcatgtatagggatgatgaataatgccaaataggtgggatgaccaggggatagcatagagttgttggattttgcaaggagaacatccttagaggaatgccagccaagctttaagattagggaagaaaggccttaggaagggggtgacatttggaacccaacttgagggaaggttggactttggacatgtgtagaagggaggaagtctatactggaccagatcatggaggtgtgggatgccaggctaaggtgttcaggcatgacctagaggattgaatacagtgctgtcttcctccaaagtgtgaggctcaaatgagatattaattgacattttgtgagcactcactgtgtcagacactggtctaagctttttatatatagatccctcatctaatcaacccagcagtcaagtaaggtaggtgctactggctttggtgccagattgtggccttacttcctgcctatgggaaaggggcatctcttagcacctctgcccccatgcaaaggtggcggaagatatgggggaagggggagaatgaagcttctgcatccttttgctcacactctatcctttgtctttctgccttagagccttggggagcagtcccttttctaggagcctcttgaaggactcaccgtagatgcaggaagacattggatgaggtcagcatagctgaagtgaggtgtctgggttagacaatggctatggccctggaattgcaagcccaggcatctccgcagccagagcctgaagaactcctgattgtgaaactggaagaggactcttggggatcagaatccaaactctgggagaaggaccgtggctctgtctctggcccagaggcctcccgccagcgcttcaggcaattccaatacagggatgcagctggaccccacgaggccttcagccagctctgggctctctgctgtcgttggctgaggccggagatccgtctcaaagagcagatcctggagctgctcgtgctggagcagttcctgactatcttgcctagggaggtccagacctgggtgcaggcacgccaccctgagagtggtgaggaggctgtggccttggtggaggattggcaccgagagaccaggactgcaggacagtcggtgagacaaacagtcttctcctgcagaggagtgggtcaggcaaggcagcagggttgtgactacgttaataattgccaaattcacaataaaaataacaatagttattgagaactgacacttattgaccactactgtataccaggaagtgttctaagtgctttacatgtattaacccacttagtcctgtcaacaatttaatgagataggtgctattatcctaattttaccagtgagaaaacagagacagagaaaagataggtaagttgcccagggtctcaacagcttctagatggtagagtcaggatttgaactcaggcattctaactctaaagctggtatgcctaaccactactccaaactgcctcccactaccgtattcacaatatgattaactcgtgttttatacttaacaaaatctttctgcatatgtgatgtctctgagtgcttatagcagtaatgtaggtagacagaaatagtactgttgtccccattttatagattaaactaagagccaaaaagttggccgggagtggtggctcacgcctgtaatcctagcactttgggaggttgaggcaggtggattgcttgagctcaggagttcaagaccagcctgggcaacatggtgaaaccctgtctctacaaaaaatacaaacgaaacaaaacaaaatgccaagtggcccacaaaggtcatcagtgaatagaccagagcctaaagccaaatccttaggttccaaggtcattgttctttctactgcatgtcagatgcctcctctgcaaaccatgggaattaaaatacctttgagccatgaggctcaaatgagatattagttgacattttgtgagcactcactgtgtgtcagatactggtctaagcttatatatatagccctcatctaatcaacccagcaatccaataaggtaggtgctattatcattgccatttgccaaatgggtaaacagagatggagaggtaagtaacttatctaactttatataactacgtgatagagctgaggtaagggaaatgaaagtatggatttaacattcgcagtttcaacaatttgcaagtgaccgctgaaagcccatgatataatgcataattttgctatgacacacattttgaatcctgcttcaaagctggtatatgtagaacagatcctttagctggatccagaaccttcctctaaacatgactttttctctacttgttatagttagtaattcttgtgatattttacttacccacattttgctgggggaaattacaggtttgggaacatatcccttgcaaatggcaggggttttctgtacatttaaactgtaaagttctatacagtgtgaggttgggggagcaaaggttttagaccggtgactttgctctttggattcctttacaaactgattgaagatacagggagactaatatataaagttacagaactaagtatgagagagtgtgccttattttaatgtacctccccacccccctatattatttcttttaaagaaaccagctgtttgtcttaagtggcagtgaagaaacaaatggaagttttagggcttcagagttgggacataaagaacttgagacccagagatgaaaacggatttaaatcaaggtctttatgattcttcatctgtaaaatgagagggttggattagaccaaaggttctcaaattatgcccctgtgagctgaccaaaagttgaactgcttctaaaattgagaaaaaaataaggtaatggaatcttgtctattatgtatttttgtttttactgtgactttttttatttttaaactttcctacctgctcctgagtggtcacaaatttcaaaacaaatggacaagtagcagaggagcttgtttttttcaggtgcaaatgtagcttgtgatcttacattgcaagatatataacttagttgcattctctgcaagtaaaatttttcaagtcttaataatgggatgaaatatagttataatattcctcaaagtgaacctgaaaaaggttggtgcctacaggactaaatggcccctaaggtaatttcctaaaagggatctttcagctctgctattttgtgattgttacttgtttcttctgtcatcaccatcttgttgaatccccctctctgtcagatgccccctctccatcaggtgcacagggatttttaaaaaacaggctttattttttagagcaattttaggctcaaactcacagcaaaattgagcagaaggtacagagagttcccatccctccccgacaagcctccctaactatcaacatccctgcaccagagcaatatgtttattaccattgatgaacctacagtgatacatcattatcatcactcaaagtagcagtttatgttagggctcttaatgttattcattctgtaatgtatgacattaagagccctattataaactgtatctaccatcatagtgacatagtaacatgtatctaccattgtagtgacatacagagtagcttcactgctgtaaaaaccctctgtgttctacctgtttattcttcctttcccccaacccctggcaacaccgatctttatactgtctccatagttttgccttttaaaaaatgttacatagttggaatcatacagtatatagccctttcagattggcttcttttacttagtagtatacatttaagttccctccacgtcttttcatggcttgttagctcatttctctttaatgcttaacaatattccgttgtgtggatgtaccacagtttatttatctactcacctactgaaggacatcttggttccatcaaagttttggcagttatgtatgaagctgctgtaaatattcatatgcaggtttttgtgtggacctagttttcagttcatttgggtaaataccaagggacatgattgctggatcatatggtaagagtatgtttacctttgtaagaaattgccaaactgtcatccaaagtggctgtaccattttgcatttttactagcaatgaatgggagttcttgttgccccacatccttgccagcatttggtgttttggattttggccattctaataggtagatagtggtattttattgttgttcgaatttgcaattcaccaataacctaccatgttatacatgttttcatatgtttacttgccatctgtatattttctttggtgtggtgactgttaaagtcttgcccatttttaaattgggttgtttgtcttcttactcttgagttttaagagttctttgtatgttcggggtaacggtcctttatcagatatgtgttttgcaaatatattctcccagtctgtggcttgtcttctcattctcttgacagtatctttcatagagcagaattttttaattttaacgaagtccagcttatcaattatttctttcatggattatgcctttgattttgtatctgaaaagtcattgctatacctgacattatctcagttttctcctatattttaggaattttatagtttttcattttaacgttaaggtctgtgatccattttgagttgatttttgtgaaggataggatagaagctttttttttttttatgtggatgtccagttttagtatcatttgttgaaaatatatttgcttcactgtattacctttgctcgtttatcaaagttcagtcgactatctttatgtgggactatttctggggtctctattctgttccattgatcgctttattcttttgccaataccacactgtcttgattactatagtttatagtaaatcttgaagtcaggtgtgtcatttctttgatttttttccttctccttcaatattgagttggttattccaggtctttgcttcttcatataaactgcacatggccaggtgcagtggctcacacctgtaatcgcagcactttgagaggacgaaatgggtggattgcttgagcccaggagtttgagaacagcctaggtaacatgatgaaaccccattgctattgaaaaaaaaaaaaaagaaaaacaaacgaacaaaaaaagactttacagtcagtttgttgatatccacaagataaatttctgtgattttgattgggtgttgaatctgtagatcaaattgggaaaagctgacatcttgactacagtgagcctttctatctgtgaacatggaatattgttccatttatttagttcttctttgatgcctttctttggtagttttccccatgtaaatcttctacatattttcttagatttatgcctaaatatttcatttttttggatgagaatgtaaatgttattatgcctttaatttcaaattctacttgttcattgttggtatataggaaggcaattgacttttgcatatttgcatatttgtaccctgcagccttgctataactgcttattagttcccagaagttttttttgttgattcttttagattttctccatagacaatcatgtcatttgtgaacaaagagtctttttctttcttcccaatctacgtaccttttgtttcctttcttatcttgtattagtctggacttccagtatgaaagaatagtgagagagaacatccttgcctttttcctgatcttagtgcaaaagcactgtgtttcttaccattaagtaggatgttagctgtaggttttttgtagatgtcctttatcaagttgaggaagttcccctctattcctagtttgccaagtttttatcatgtgtgttggattttgtcaaatgctttttctgcatctgttgatataatatatgatcatgtgatttttctttttttgcccgttgatgtgatgggttacgttaattgattttcaaatgttggaccaggcttgcatacctgggataaataccacttggttgtggtgtgtaatttcttttttatacattgttggatttgatttgctaatattttattgaggattttgcatctttttttttttttttttagctggagtcttgttggttctgtcgcccaggctggagtgcagtggcatgatctcagctcactgcaacctctgcctcctgggttcaagtgagtctcctgcctcagcctcccgagtagctgggactacaggcatctgcaaccacacccagctgatttttgtatttttagtggagatggggtttcaccatattggccaggctggtctcaaactcctgacttggtgatctgcctgccttggcctctcaaagtgctggtattacaggtctgagccaccacacccagctgatttttgcatctttgttcatgaggaatattggtttgtagctttcttgtcttgtaagtaatttctttggttttggtattagggtaaatgctggctttatagactaaataaggaaatattccctccgcttctatcttctggaagagatagtagagaattgttataatttcttccttaaatgtttggtagaattcaccagtggacccatctgagcttggtgctttgtgttttgaaggttattaattattcagtcaatttccttaatagatattggcctattcagattgtttatttttgtgtgagttttggcagatggggtgggtaaaggaattggtctttttcatctaggttatcaagtgtgtggccatagatattcctttattaacctttatgtagttcataatattcctttattatactttcagtgtctatgggatctgtagtgatgtctctgttttcatttctgatattaataatttgtcttctgtcttcttttcttttttatttttgagacgggttctttctctgttactcaggctggagtgcagtggtgggaccttggctcactgcaccctctgcctcctggacttaagcaaccctcctgcctcagccccccaagtagctgggactacaggaccacaccaccatgcccagctaacttttgtatatttttttttttgttgagatgggatttcaccacgtttcccaagctggtcttgaactcctggcttcaaatgatccaccgccttggccttccagagtgctggggttacatgtgtgagccatcgtgcctggactgtcttttttcttagtctgactagaggcttattgatgttattaatcttttcaaagaactagcttttggttttgttgattttctctattgatttcccattttaaatttcatttatttctgctctaatttttacttcttttcttctgcttactttggatttaatttgctcttcttttttctaggtcttatattggtgtacctgtgtccctggactctgacctttgccagtgcttctcaattttttcccatcttaggtgggacaggatgcctaaagggggctgcactgggtatttcttatcttgcatgtggaagagcagagggagctggaattgcatatttctcttccgacagttaggttaggctttggtaaaatagtttctgctgaggacaggacttattaagaagagcagagtgccctggcatatttcaaaatggttcttttttcctgccatctgccataagcatgaagagatttttctctgatattcactgtgagggtctggttgagctcctggagataaaacttacaaaaatgtgcccctgctcagtgattaagtgccctggagtttttacctctcagagttgtccacactgaccttccagcagttcatcaattacagtttaggtttttctcccctggaactggttcccacagaggcttctgctccactaagttgtgattctctgattctacctgtttgtctctccaattttggggagaatggtttgccctgtgacctcacttctctgacagatctaaggagagttgttgatttttcagtttgttcagctttttacttgttactgtagagtctagaggggcaacttgtagactacagacttcttggaaactagaagtctgacctactaattttttgtctcctggttgtcacttgaatctacttctttctgtgtccaaaattaccatccatggaatcagaatctttgcttagggatggtaatagttggaggcactggggttgagagtaaagattgttgttgaatttagtcacacagttcctctgtaggttataatgataacaaagtgaatttttttttaacatgaccatataagaagattgataagcagatgctttctccctgtgaagtcacacaggacactggtggatcttcttatttggaatggcccttgatgctcatggcccattcctatatgtcttctcaatggtaaaaatccttctctgtgagtggatctgaattttcaggccagccaaaaaagttttggagctaagtttggcaaactcagtaatttaatgaagatagttgttattattttggttcaaaaaaataagactcagagcagtatatctagtcataagtttttgtataaaaaagagggaagctaagaatacacatttacatttgcttgtatgtagaaagaaactctaaaagaatgcagaagagcatagttacctgtgatgaggagaggggaaaagaacggggtcgatgggatgaagatggatggaggtggggcattttcactgaatatacccatgtatgtattttctgtttttaaaccatgtgagtctattatctattgaaaaaaattgaaatatgtttttaaaagttaggtgtttctataaagtattgagattgttatattttggaggttttatagcctgggtaacaccttgacctctctacctgtgaacttggaaccagctgagaaatagagataagaaattagctgtgtgattgatgaagttgattgggtaatgttattttagttgattactcccttttattttaaatatctatatctctgagtaccttttttttttttgcctgaaatccaacattgaaatgaaaattgccacttcctttttccttttgagttagagtgccttgtcttttgcatgtccttctattgtaagattaacaacacgtacttttatctcattttaaaattccatctaatttctttttttgagacaagttctcactccattgtccaggctggagtgcagtggcatgatcataggtcactggtacttcaaacttctgggctcaagtgatccttctgcctcagcctcttgagtagctgggggtacaggcatgtgccaccatgcctggttaattttatttatttatttatttattatagaggtgagggtctgctatgttgcccaggctggtcttgaacccttggcatcaagtgattcccttgcctcagcctcccaaaatgctagaattacaggcatgagccactgcacccagcctccatctgtaattctttgtcctttttaaaaattttattttaaaaatatctttctctttcagcagagatatttagagcaattgcatttggggttataattttatatttttttcctgtttttatgcctccctttgccttttaatatacaacttgataacttttatctttttttgatcatttaaaaagtaagcaacctatttttgatgcttatgggttattttttaatgttacacaaattttacataatttatctctttatgaatcaaaaatgttttgaacagtgggactctcattgaaacacttggatcgccaccctgtgttcaacagatggtactcatttggtggtataaatgctggtctacctaccaaactcactctgatggctttctcatcctatttcaagccattttggatcttaaaagagcctgttagcctctggactgcagttgtactcaaaataccaaagtgggtcttactgaattgttgattgggaattttgactatttgtgtgtagggactggaattgcatacagaagagaccaggcccttaaagacaggggaagaagctcagagcttccagctgcagccagtggatccctggcctgagggacagtcccagaagaagggggtgaagaatacatgccctgaccttcccaatcacctaaatgccgaggtggcaccacagcctttgaaagagagtggtgagtacatctgagaacattagggaatgaggccttctgcaggggagagggatgggaggtgaggaagggtgcatggggaagaaggatgtgcagaattcaaggcaagggataggctgcagtgtggtgggcacacttactgagaagtaagcaagcctcgtaaagaggctgtgcctatcgatgatgtcatcatgccctgctgtagctggagtcctgcagcagtgcaggctgggacaggggtgggtggtgatcacaggaggtcagggctggcatctcccacatggcacaccactcacagcagcttaggagctacacactctagaagggaagtaaaggggaagtctgcactggccatagggatagccctagcttgatccaagtgttacttttggaaagccaatctcaaagggaggtgattttttgggaaccagagcttgggtttcagtgactttttcttttcctcagctgtcctcactccccgagtccctactctcccaaagatggggagcgttggagattgggaggtgacagctgagtcccaggtaagctgttactcgttcttcctttcctgtcattgctgctcctgtgctcttgcccccacagtgttcctcctctctctccatgacctctgctcagcaaaagggcatgaggcccagggtgttagcctttgcccttcacccccagcctgctgggccccaaacatccccaaacacatgtatgtaccaaatggccatcctgctccttatgatgccagcttcacacatggtatccctctgttcccatcatctttcctgggagcctgctagggttcctaggctgttgtcaaaggtcagtgatgtttggggtccttgtcttgtgcatctcgcaggaagccctgggccctggcaaacatgctgagaaggagctctgtaaagaccccccaggagacgactgtgggaacagcgtgtgcctgggtaaggagacgtaccctctgaaggtgatgttgtcatgcttctgatacacccagttcccaaagagggttttgccgctcctttaagaatcatggctctgcagtctctggaatttcagaaataggaagaagacttgccctttgtagccagcactctcatggcagggatggagtctgcctggagacggggtggcaggatggcttccaagagcctgccctctctgggcacattaccttccttacctcagtccattcaccacagtccaggggccaggcctggactgccatctcagaaatctgattttttttagcactgtaaataggatctctctctcaggcagacttaagtgaactaaacccatgagaccaatgaattaaacccaataggaataaatatcacagagcccaaaatacctgaagcccatataagcagcacagactcctttctatgtgggcactcctatgtggcaagccaaataatagggagccgtttccctgtggagcccgggatcactgtgtggggagttagacatgtgaatagctgaaatagaaaagactctgataggcctgactcatggtaagtttagataccagaagctcgctggctacttgcttgacagtggaacccctttttacacatgatatctgggggaaatagtgttcaaaggaacagattttgggaaacgctgaattaaattatccttatacctctttaaacccttttcatctagttttcttcaaatatttatttcaattaaaggcttcctattttgttagggccgggagctgttgggatagcagtccattaaacatagctaacttttaaaaataaggaaatttattttctcacattattagaagtccagaggaggacatgctccagccacagtacagactagctgagcaatgtcttaatgggtctgtgttctttatttctgtctgccatcctcagtgttagcttcatattaaagctgttttgtttcatggtcaaaagatagatgccaatggtggcaatggatgcctagcaggacagagactcactacacacacaaacacacacacacacacacacacacacacacacccttttcctccagccatggagttcagtctaattgggccaatttaggccatgtgcccatctgtggaccaatgagttactcttatatgatgtttcatgtttcataacaacaacaacaacaaacaaatgaacaaagtaaacaggtcacttaacatttctcatatattggtcgtgttacctcttctctctccctattcctgtaaacattttatgggatcaacttgggaatttctcgttagcctcttgcaaggaaaagatagaagtttcagggagattttggacaaacatgccgctcaacagaccatttctactctgtcatttctcttccttttgtaggagttccagtttcaaaaccaagtaatacctccgagaaagagcaaggaccagagttttggggtctaagtcttataaattctgggaaaaggagcactgcagattacagcctggataatgagccagctcaggcattgacctggagggattcaagagcctgggaggaacaataccagtgggatgtggaggacatgaaggtgtcaggtgttcactggggctatgaggagaccaagactttcctggcaattttgagtgaatctcctttctctgaaaagctccggacttgtcaccagaaccgccaggtatatcgggccattgcagagcagctaagggcaaggggcttcctgcggacactggagcaatgtcgctatagggtcaaaaacctcctacggaattaccggaaagccaagagcagccacccaccaggtacctgccccttctatgaggagctggaggccctggtcagggctcggacagccatcagagccacagatggcccaggagaggcagtggcacttcccaggctcggggatagtgacgcagagatggatgagcaggaggaagggggctgggatcctgaagaaatggcagaagactgtaacggtgctggcctggtcaatgttgagtctacccaggggcccaggattgcaggggccccagctctgttccagagtcgtattggtaagaacatgggggtttagtcagattcagatttccaaccctcctaccagctagactgctattccctgaggtcagggcacaggctgcaagtctggattgaagccactagagtgaagagctacattccttaggtcatcctcaaactccaactttcttttcccatgaccaagtctctttgcaaaagtcttcttagttatagaagcaaacatttttaaagccttaaggggcctcaaagagtgaatccagtatttccaaaagtgtgtcactggtagtatgggatgatcatcgacgttacatgaatgaactttaaattcttgtatttatatatttctcttaatttgtatgagtgcatcaacctgtgatttcacagataacaaagttaggtaaagagtgatggcgagtgaaatattgaacagataatggcagaaatcccgacagtgtagacttgaataatcaatgtctgggaaacacccaatcattgtaaaggtgcaaacatggaagtccatgagatgaggcgtcttatagacgcacaggtaggagcagagcccggatcagagcctgtggctcctgcctgccggtttcacatggttttccctccaccatgttgccttcctgggctacatcactttcctgcagaggagctgagactagaccacctccttttcattcccctgcaaaggaggaaagtgtgtcctcatttggcctttcttgcaggactatttgaaactcatttatgcctctaatctttaggaattctcagctttcatgttttgttaaaaggagaatttatggccaggtgcggtggctcacgcctgtaatcccaacactttgggaggctgaggtgggcagatcacgaggtcaggagatcaagactatcctggccaacatggtgaaaccctgtctctactaaaaaaaatacaaaaattagctgggtgtggtggcacgcacctgtaatcccagctactcaggaggctgaggcaggagaattgcttgaacccaggaggcagagattgcagtgagccaggattgcatcactgcactccagcctggcggcaaagcgagactccgtctcaaaaaaaaaaaaaaaaaaaaaagagaatttataaaataaatagagtacaggtattgagtgaatatggggaaaatcacatgcatcccaattacaggcctttccctgaactaatcagctaaagccaggcacatgggatcacctgatataattgatataacatggctacttaagtcctcaccttcagccaagacttgaagtgttaatagaatctcttagaagagggtgagggtgggaagctctggctggctgtcctagcatgcccctgagaagcaaagggatattctccaggtacctggatagtttctgacatgcctatgttctaggtattttgaagggcaggtgactttattctctgatgacctaggcacatctcattaagtctcacagttctcaactcttcactcctgacagcaggtgtgcactggggctatgaggagaccaaggccttcctggcaattctcagtgagtccccattctcggaaaagcttcgtacctgtcaccagaacagccaggtgtaccgggccattgcagagcggctgtgtgctctgggcttcctgcggacactggagcagtgtcgctacagattcaaaaacctccttcgaagctaccggaaagccaagagcagccacccaccagggacatgccctttctatgaggaactggactcgctgatgagggctcgggctgcagtcagggccatggggactgtccgagaggctgcaggtctccctaggtgtgggcagagtagtgctgagactgatgcccaggaggcctggggtgaagtggccaatgaagatgctgtcaaaccttcaaccttgtgtcctaaagccccagacatgggtaagcctggagtaattggatgttctcaaaatctgtgggcatgtggagagaatgaggaagccaggctcattatcttttgtctcttaactaaaagagagaatgggattgaatgggaaaaagtatttctgctttgctcagattatccagtctctagctttgtgtgatcccccgaatcagtcagtcagtcagtcattctatcttttactaggtatatctgggcggttagagactttattcaatccagtatgacacaggatatatggaatgtactagaagaaggaggtgttcatgattgagtactaagatagaggagtttgatggggaaacaggttggctgtggctgctgggctgagccccatggctcacttggtggggtcaccatgtcccagagtccattcctcagctttgcaggtcacaaacacttgtgtgtaccaaaacttgatcaatttcttgttagtcacatttataagatgtgcgatagaagatataagaatcaaattcatgttagccaaattcacagatgtacaatacagacacacacaaacacacacacacgcgcgctaatgagtgaagaaaaactgcatttctgtccattttttcaggttttgaaatgaggcatgaggatgaagaccagatttcagagcaggacatttttgagggtttgcctggagccttatcaaaatgtcctacagaagctgtttgccaacctcttgactggggagaagacagtgaaaatgaaaatgaagatgaagggcagtggggaaatccctcacaggaacagtggcaagaaagttcttctgaagaggacttagaaaaacttattgaccatcaaggcctgtaccttgcggagaaaccctacaagtgtgacacatgcatgaagagcttcagtcggagctcccacttcattgcccatcagcgaatccacacaggtgagaagccctacaaatgccttgaatgtggaaaaaactttagtgaccgctctaacctcaatacccatcagagaatccacactggagagaagccctataaatgccttgaatgtgggaaaagctttagtgaccattctaatctcatcactcaccagagaattcacacgggggaaaagccctataaatgtggagaatgttggaaaagcttcaaccagagctcaaaccttctgaaacatcagagaatccacttgggaggaaatcctgaccagtgtagtgagcctgggggaaactttgcccaaagcccatcttttagtgctcactggaggaattctacagaagagacagctcctgaacaacctcaaagtatcagtaaggacttgaattctcctggaccacacagcacaaactcaggggagaaactttatgagtgttctgaatgtggaagaagcttctctaagagctctgccctcattagtcaccaaagaatccatacgggagagaaaccatatgaatgtgccgaatgtgggaaaagcttcagtaagagctccaccctggccaaccaccagcgcacccacactggagagaagccgtataaatgtgtggactgtgggaagtgcttcagtgagcgctccaagctcatcacacaccagagagtgcacacaggagagaagccctacaaatgccttgagtgtggaaaattcttccgtgaccgttctaacctcattactcaccagaggattcatacgggagagaagccgtataagtgcagagagtgtgggaaatgctttaaccagagctccagtcttattattcaccagagaatccacacaggggagaaaccctacaagtgcacagagtgtggcaaagacttcaacaacagttcccacttcagtgctcaccggagaacccatgcaggagggaaggcgtcgtaggggacagtttcctcaacaacaaaggaggactcaatgtatatatcttatatcataagatgtatgctagagagaaactttccaatttttaagcttggtgtgtacccagggaagttatcttggtataaaccaggtaatttggaagtgaattacaaatactaaggatccagatttgaaggcacttttaagtgtaatttgtttttcttctgtaaagacccacacagaatcctgactgtccttgtatttgctatcatgtaagagctgtgtcagtatttgagccaaactggcaacttacgagattagagttaaatcagtggtcctgagcagtgattccaaactctcactgtgccttcacaccatccatgtgtaatccaccccatcagcagtggttctcctactttctcagtgggggcatatcctcaagggagaatgttgtgactctggtgagagaggagttggcctagagcaggccactgtgagctcagcacagagtaggaagaacagtgacatcattacaaaatcatcaatagcagcaatagctggtgtttattgagctgttgctctttggcaagctctgtgctaagaactttgtatacatcatctcatttaatcttcacaacggccccaggagataagtactaactttcttcccatttcctagaggcttgggaaattaagtaactcgcactggtcacacatctgtaagtgggagaggcaggattcaacagatctgtctgtcttgagtctatcgtgctcttattgctatactgaattcccattcatgttaggtaacttaggggccagaatctccatgcactttgtagaccacatttcctgttatgaaatttccacattttgaattttttaaacaaatatggaaactgagaatccctaaggattaaaggacttgggatatccagaattggtgaagtgatttgagcaaggatgagctattatcaaaatacttgatgtgagtttccatcttcgcaataatatgggtgagagatataggtgggttgagattgggaaaaatatgcggcctaagtaatttttcttccaataagatactgctttggctaaggaaatgggatgtaagagttctctttttctcaggggacagtcctacttcttgccatgcttggctgatcataggttaaccctaacagaagcctggggtccctacatttttgtctgtctggcttttccttttggcaagcagaagctttgttcttggtccccatgccaagactgaggtgggaggtgctggtgtatatggtcatctactgagagggccttgaccactgttctgtgtaccaggttcttggcacaattttaccctgagccatcctgtcccaggcctgcccagggctttctgtatgttgacccttaagactcacctcccacatggacaggctaagttagaaaggttcacataggatggttttaacatttgcagcactttggcctccagagtttctccttagaagggtttaaaactgttgaccaaggacttcggtttccataggactttaaaggaaaatccccctcctgccatcctcttatgacactaggatgtattcataacctgcttggttcatgggctggggaagtacctatcagatagtggatgtgaagcagccttgaagaatggaacttttattaacatgcgaggaagccagtggagagatttgctactcccacagagtgatatcccttcttaaccccttcccctgcttcagaacctcctttcccaagaaccagccccactaggatcaccgtcaactccctcccagtttaccttttctggcccacgttatctctgcggggcaggggtcatgggatgaaccctggatagaagtcagcagatgtcagtaactgcagtaatacagtgatattgtctagtaatgtgagctgagaggaaggatcctgaggtgagggagagggagggaattccagggaaaggcactgttgtgtggaatagcatggattcagggtggggttgtatgatgggaggttgggaacagggagctgatattagaggagtgctggagcaaggtcactgaggacctcacatgtgaatggagtgtcaacaccaggcccggggcaatgttcagatgtgcatggttgaaatctgacagctgaatggaacttggacatgctgcaattaggatggccttttgggacactgttgtggtatttcagctaaaggctagggtctgaactagagcagtggtgacactgaggaggagggaatgaatgggaaaggtctcagaggcagaggggaggacatcagaggaaagctagaatgcctttggtgactgggtagagcatgtcctcattcagaattgggagcacaaggaggagaggctgatagagcaggagggcagaagatgagaagtttagtttggtatgtctagaacttgaggtgcttaagggaaatcatggtgatgctatgcatttggatgtcggctagcagctaggggagaggctaggactagagatctgtgtatgcgaagtagttaaactaatgagaaaggaagaatttcagtttcaaatattgggcctaggacagagctacttgatagtgctgaatggagaggaagatggccctcaaaggagatctagaccattccccactcccacccactaccatcatgttctggaccctgtcttctttgttactgacccctgaattcttcatgtagccctgagttttctggagccctcactgtggaagtcaagctgagctctgtgtggatgtgaggtggtagtcctctctccacttggtcaccctttcccctgggtttggtagtgtgttagtgtctcatatctttagtgaacagttttgatgtttattatctgccattcttgtctcatgaatcttaatagaggttcagtcatgaaagcaaggccagtgtgggccaggtgagaaaatggcccaggtggtcccttcctccttgtctacctgacttcctttggaagaagcactctttcagggggcttcagtgttccaggcttgctgtctacccaagagcttgctgggcacccaggcgccctccagtaggtctgtgctgctcagataaactgacatctggttttacacaccctgagctttgctagcgtgattctgctcttgggaagtagattcactctgcagaatgggtggacagtttctcagccttcctggccacaggtcagaccctggttatggaaaaccaaaccagcaaatgctgccctgggagggtgttacatcatgtgagctgctaaaggcaggatcgtctccccagatggctgcctccccttgatttcttcaccctccacctcaagaagggcattggctcctctgaagggacaaaaaggtacctaaaggaccttaggcctcccattcctcagacccccagaggcagcagacccaaaggtaggggcagggaaaggaggggccaagactttttcagatactcggttttttctaaggccttgacctcagcagctgaactcatggtcatggctgccttggccttattgtccactgtagcctcctcccagaagccgagtaaagcagctagggtccctccatgctaaataatgtagtcaggcgctctgggtagtccgtcctgcctcatcttgttctggggcccccagtggggatagctctctgctttcgggctgcagaaaagaattgagtcactttctgtaggggagtaacaccctttggggacaggggtgcagttttgaagtaatgaaggcagtgatgtctggagtgggtgtgggtgttgcaggtgaacttgcctcacccaggctgttctgggtctttgtactccagagttctgtcctaggcttgcttcttcattcactctgtttccctttctcttctttttttcttttcctttctttctctcttttcttctgtgtagatgctaatgacttccagatctgtgtcctgctgtggcctctcctcttaggatcccagctgcctgccaaccagctgtgcttgggtgactcctgggcatctcaaagccccggtgtctaccatcacccatcatggggctcttggcctgcccattcagcacgtgcattgatgtacacactcagtgactcccatccaagcctcccctgcacgtgcctggagagacctgcccattggactcatcttggactcagttctgccaatactttctcccttctaagagcatttccagttgggctggagttacccagctgcctgagaggtctctttctgaatgaagtcaatatctaaagtcaaaattaatcattcaaaatattcccttaccccatttttttttggggggagatgggggtcttgtgttgcccaggctggtcttgaactcctggcctcaagcgatcctcccacctcagcctcccaaagctccccttaacctcagttttgatcccatcctccatttgggcattgctcagctcccccacctgttaatagcaaacaccaatctcaagcccctgccccaatctgctacaaggggttagtgttccatgcagtgggagtgcagggaaggctttacaggagaggagggagttgaaatgggcctggaggcctgggatggtagacactggatccttttcccccacagctcctggctgtttcttcacactcccagcatcactattactgctagcatgtctttagcatcattttgccctccctctgactttcagcaagcctgcacttacctccaaataaatgcatgttttcggggggcaaaggcaggttccttccttaccttattgttgcttcccccaccccatgctgcagctgagtgggtgacctttctcctcacctccgtgtgccgcatctctcacctagtctctgttaggaaccctacaggagcctgcaccccagtaaccccattttatgctgcttggaggaagagacagagagtttgagaggtcttttcagtgtgtgtttggttcccccacttctcaaagctgagagcttctttgttttaagagccacttggttaagtcaagagcattagaagagtaaaaagaagaatccaattagataattttacctaaacatgctatagtcgactagggagtcacatagacattgattttctaatgagggcgctgttggtgattctctctgtgtgtaaagatgcttctgatcatgcctgctattacatgatacttatttctaaagtcactttttttttttttttacattttcattgtagaaaaatatcccataaaaattgtgccccctagagggcgagggccacgggaagggggatcaggaaaacaagaatcagtctctaagctggtcctggagcagcatgacagatgtatctgagcccaagcaggagaggagccacaggcccaggctggcagagttgtgactactagaatctcgagtcactggggctcagggagccctaacttggtggcaggtgacaaatgtggcacaaaggagaaaggagtcttctccttccacatagaacacacttggcttcagtgctttggggggattcgtggaccacagagaagcttccgcatatttataggcactggggaccagcaggaagtggtggtgagacactttgaaaccctccactgcagacttcacccagggggcaaggcaggagagaatccctctgtggacagcacttgagaggaaagggcttgttcatgaccacgtatgaggtcgccaacccaaccctgttcctgaagtttcccagaaatagatggagaggtaaggccagctaggctggagcgccagcatcagtagtaggggcaggagctcacgctaaacccggttggtgtgtcctggagaagcacaggtgtcatctccagggacctttctcgaccaactaatttatggaaatgagacatttgtaattgattttaattccctcttagggactgtgaaattaaaatggattaaattttgtccatcaggagcctcagggatttaatgtccaattctaaaacctgaacaggcccttttgttttgcaatttgtggaccaatccctggcttcattttatttggctttgctttcacttccccattttctgttattttttttttttttttgtgctgttatgtacatctcttaaagctggtcaaatcatattttgggatggaatggcctgataagttaataaattatattaaactgccaaaaaaggaatgtgttttcgattcttctggcttcttcctggttacaccaaaagcatgggggagaaaaggaagggaagtcatcgagacacaggttgtcagggagattggggccaaggtctcaagccccttgtgctgggcaggtgtcttcttttcattgttccctgtggtccttcagacatgggtggctcttcaggcatgtccacaaccccaggagccatggcctcagtggccggcgcaactggccggagccacagtggctccgggtttcggggctgtccttttgtccctttgatcttacgcagggtgagggagccaatcacgagaggctcacccctgacgtcacccagtccccagggccagtgagggccctgcgttccatggggccccctggagggaggagtggcatctcagtctgctggtccctatgcatctactttgatatgtccctcaggatccctgtgctaggaaaccagaggtgtctgaaatccaaataacacaaggataattatggatgaaaacataggaaagagttcccagggggctgaaacttacctgattcctctcatttgcttcctggttcaggaacagaactgatcgcacttcgtacttgagaaagaggggagagctggagcgtctttatattcttttctggccttcctccacccattgtcctactgaggacattcaaaagactgtagctcaaggctgaagtttcctaatacacgctcactcttttgtccttattgaatgagatataggcaactttgccttttaggcccttgatatggtttggctgtgtctccacccaaatctcatcttgaattgtagttcccataatctccatgtgttgtggaagggacctggtgggaggtacctgaatcatgggggcagttacccctatgctgatcttgtgatagtgagtgagttctcatgagatctgatggttttataagtgatttttccccactttgctctgcacttctttctcctgccactatgtgaagaaggacgtgtttgcttccccttccgccatgattataagtttcctgaggcctccccagccctgtggaactgtgagtcaattaaacctctttcctttataaattacccagtcttgggcagttctttatagcagcgtagaaacggactaatacagctctgttatcattgaattttgattgtgaattcgttttgctcggaatccactgagaacttgttttttcttgtaggggtcagatctcaagtataggtgttactagtggttggcatgtactaatattctgcatgtcttgggacgaagatgagatctggaggaaatgagtcatggtctccctgaggagaaagctctgggtcttgctgacatgttttcatgtaacttctttctagcagttactccaatactgtccagacccacagggcttaccttcctggaagacaggacagagatcacagactcctcatagtccatgctcttgctgttagctgtagtttgaccacaaatgccagtaaggcatacaggtcagttataaatgtcagggtccactcaggctggccagccaattcaggcaggaacaagaactgttacctgaaggggtccaacataggtagccagagagctggccaaggccagtacaactgagaacgtaatactaggaaaaagccctacctgagggagatgcctcatggctggggctggccatctgttggccccatgtcaagaagctgctggggctgggtgcagtgactcccacctgtaatcccagcactttgggaggttgaagtgggtggatcactagaagccaggagttggagaccagcctgggcaacatagtgagacctcgtctctactaaataaataaataaatccagaggatcccacctccctgcagccctttcaaatggaggctgtttatttgcatacagcccaagttcctcctggtgggaggtggggttgctgttctttctcctcactccttgaggctgcctccagatcatagcttctttcctccctattcatttgaccagtaattgacagccaatagctataaagagcctaggggccaggcatgctggtaaggaccttgggtggatgacatcatttcagcctcagcacgactcaatgaaatattgttgttgctatccccattttaccacagagcctcagaggctcaggttaataacttgctacttcatatattgtctcaaatatatgaatggaaccaacaatatatgatgttcctacttcatatattgtctcaaaatttttaagaacagcttgtttgaatttgaattcagttaatgtcatacatcgcaactggatttaagatgaggtcattttcactgaggagttttccagaatctgtatgttgtcaattacatccttatggtatcattgaacttgtttccctgtcatctgtatttcctgtaactggtatttagatccaaaggtttaaacagattcaaatttgattttttttttggcaagaatacttcataggtggttgttatgtacttccatcagaaggcctataatgtctggttgcctcgctttttgtgatattagcagtcattgatgatcattgccagaatttattttaataaaggtttcaaaatggtgataaattctatccttcatttactggctgcaatacttttgtaaagagactccgcttcttaatatttagttaccctgaaatacattgcatacaaaaagcaggatgaatgcttgctcttccctccttttacttactggttatcaaaatatagctggtttcttaatgttttccataagtgactaatgagtttttaaaaaaatgttatttattatttatgattatttcaatagcttttggggtacaagtggtttttgttacatggatgaactatatagaggcgaattctgagatttcagtgcacctgtgtgagttagtgtacattgcacctagtgtgtagtttttatctctaggccccctcccagcctctgctgtctgaatctctgaagtccattatatcactctgtatgcctttggatactcatagcttagctcccgcttataagtgagatcatacagtttttggtttttccactcctgtgttacttcacttagaataacggcctccagctccatccaagttgctgcaaaagatattatttcattgattttaatggctgaatagtatttcatggtgtacgtacaccacattttctttatccactcattagctgatggacagttagggtggttccacatctttgcagttgtgaactgtgctgctctaaacatacatgcgcaagtgtctttttcatttaaggacttattttcctttggatagatacccagtagtgagactgctggatcaaatggcagatctactttaagctctttaaagaatctccatactgctttccgtagaggttgtactaatttacattccctccagcagtgtctaagtgttctcgtttccccacatccatgtcaacatctattgttttttcacttatccataatggccattctcgcaggaataaggtggtatttcattgtgttttttttttttctttttttcttttttgaggcagagtcttgctctgtcacctacactggagtgcagtggcaccatctcagctcactgcaacctctgcctcctgggttcaatcgattctcttgcctcagcctcccgagtggttgggattacaggtgcctgccatcatgcctggctaatttttgtatattttggtagagacggggtttcaccatgttggtcaggctggtctcgaactcctgacctcaggtgtccacctgcctcggcctcccaaagtgctgggattacaggtgtgagccacc

SEQ ID NO: 926 - DNA, 3275 bp, Homo sapiens
cacttccgccctgttgtgaagtgggtgtctcggtggagccttggggagcagtcccttttctaggagcctcttgaaggactcaccgtagatgcaggaagacattggatgaggtcagcatagctgaagtgaggtgtctgggttagacaatggctatggccctggaattgcaagcccaggcatctccgcagccagagcctgaagaactcctgattgtgaaactggaagaggactcttggggatcagaatccaaactctgggagaaggaccgtggctctgtctctggcccagaggcctcccgccagcgcttcaggcaattccaatacagggatgcagctggaccccacgaggccttcagccagctctgggctctctgctgtcgttggctgaggccggagatccgtctcaaagagcagatcctggagctgctcgtgctggagcagttcctgactatcttgcctagggaggtccagacctgggtgcaggcacgccaccctgagagtggtgaggaggctgtggccttggtggaggattggcaccgagagaccaggactgcaggacagtcgggactggaattgcatacagaagagaccaggcccttaaagacaggggaagaagctcagagcttccagctgcagccagtggatccctggcctgagggacagtcccagaagaagggggtgaagaatacatgccctgaccttcccaatcacctaaatgccgaggtggcaccacagcctttgaaagagagtgctgtcctcactccccgagtccctactctcccaaagatggggagcgttggagattgggaggtgacagctgagtcccaggaagccctgggccctggcaaacatgctgagaaggagctctgtaaagaccccccaggagacgactgtgggaacagcgtgtgcctgggagttccagtttcaaaaccaagtaatacctccgagaaagagcaaggaccagagttttggggtctaagtcttataaattctgggaaaaggagcactgcagattacagcctggataatgagccagctcaggcattgacctggagggattcaagagcctgggaggaacaataccagtgggatgtggaggacatgaaggtgtcaggtgttcactggggctatgaggagaccaagactttcctggcaattttgagtgaatctcctttctctgaaaagctccggacttgtcaccagaaccgccaggtatatcgggccattgcagagcagctaagggcaaggggcttcctgcggacactggagcaatgtcgctatagggtcaaaaacctcctacggaattaccggaaagccaagagcagccacccaccaggtacctgccccttctatgaggagctggaggccctggtcagggctcggacagccatcagagccacagatggcccaggagaggcagtggcacttcccaggctcggggatagtgacgcagagatggatgagcaggaggaagggggctgggatcctgaagaaatggcagaagactgtaacggtgctggcctggtcaatgttgagtctacccaggggcccaggattgcaggggccccagctctgttccagagtcgtattggtgtgcactggggctatgaggagaccaaggccttcctggcaattctcagtgagtccccattctcggaaaagcttcgtacctgtcaccagaacagccaggtgtaccgggccattgcagagcggctgtgtgctctgggcttcctgcggacactggagcagtgtcgctacagattcaaaaacctccttcgaagctaccggaaagccaagagcagccacccaccagggacatgccctttctatgaggaactggactcgctgatgagggctcgggctgcagtcagggccatggggactgtccgagaggctgcaggtctccctaggtgtgggcagagtagtgctgagactgatgcccaggaggcctggggtgaagtggccaatgaagatgctgtcaaaccttcaaccttgtgtcctaaagccccagacatgggttttgaaatgaggcatgaggatgaagaccagatttcagagcaggacatttttgagggtttgcctggagccttatcaaaatgtcctacagaagctgtttgccaacctcttgactggggagaagacagtgaaaatgaaaatgaagatgaagggcagtggggaaatccctcacaggaacagtggcaagaaagttcttctgaagaggacttagaaaaacttattgaccatcaaggcctgtaccttgcggagaaaccctacaagtgtgacacatgcatgaagagcttcagtcggagctcccacttcattgcccatcagcgaatccacacaggtgagaagccctacaaatgccttgaatgtggaaaaaactttagtgaccgctctaacctcaatacccatcagagaatccacactggagagaagccctataaatgccttgaatgtgggaaaagctttagtgaccattctaatctcatcactcaccagagaattcacacgggggaaaagccctataaatgtggagaatgttggaaaagcttcaaccagagctcaaaccttctgaaacatcagagaatccacttgggaggaaatcctgaccagtgtagtgagcctgggggaaactttgcccaaagcccatcttttagtgctcactggaggaattctacagaagagacagctcctgaacaacctcaaagtatcagtaaggacttgaattctcctggaccacacagcacaaactcaggggagaaactttatgagtgttctgaatgtggaagaagcttctctaagagctctgccctcattagtcaccaaagaatccatacgggagagaaaccatatgaatgtgccgaatgtgggaaaagcttcagtaagagctccaccctggccaaccaccagcgcacccacactggagagaagccgtataaatgtgtggactgtgggaagtgcttcagtgagcgctccaagctcatcacacaccagagagtgcacacaggagagaagccctacaaatgccttgagtgtggaaaattcttccgtgaccgttctaacctcattactcaccagaggattcatacgggagagaagccgtataagtgcagagagtgtgggaaatgctttaaccagagctccagtcttattattcaccagagaatccacacaggggagaaaccctacaagtgcacagagtgtggcaaagacttcaacaacagttcccacttcagtgctcaccggagaacccatgcaggagggaaggcgtcgtag

SEQ ID NO: 927 - protein, 1024 aa, Homo sapiens
MAMALELQAQDQPEPEELLIVKLEEDSWGSESKLWEKDRGSVSGPEASRQRFRQFQYRDAAGFAFSQLWALCCRWLRPEIRLKEQILLVLEQFLTILPREVQTWVQARHPESGEEAVVEDWHRETRTAGQSGLELHTEEWLKTGEEAQSFQLQPVDPWPEGQSQKKGVKNTCPDLPNHLNAEVAPQPLKESAVLTPRVPTLPKMGSVGDWEVTAESQEALGPGKHAEKELCKDPPGDDCGNSVCLGVPVSKPSNTSEKEQGPEFWGLSLINSGKRSTADYSLDNEPAQALTWRDSRAWEEQYQWDVEDMKVSGVHWGYEETKTFLAILSESPFSEKLRTCHQNRQVYRAIAEQLRRFLRTLEQCRYRVKNLLRNYRKAKSSHPPGTCPFYEELEALVRARTAIRATDGPGEAVPRLGDSDAEMDEQEEGGWDPEEMAEDCNGAGLVNVESTQGPRIAGAPALFQSRIGVHWGYEETKAFLAILSESPFSEKLRTCHQNSQVYRAIAERLCALGFLRTLEQCRYRFKNLLRSYRKAKSSHPPGTCPFYEELDSLMRARAAVRAMGTVREAAGLPRCGQSSAETDAQEAWGEVANEDAVKPSTLCPKAPDMGFEMRHEDEDQISEQDIFEGLPGALSKCPTEAVCQPLDWGEDSENENEDEGQWGNPSQEQWQESSSEEDLEKLIDHQGLAEKPYKCDTCMKSFSRSSHFIAHQRIHTGEKPYKCLECGKNFSDRSNLNTHQRIHTGEKPYKCLECGKSFSDHSNLITHQRIHTGEKPYKCGECWKSFNQSSNLLKHQRIHLGGNPDQCSEPGGNFAQSPSFSAHWRNSTEETAPEQPQSISKDLNSPGPHSTNSGEKLYECSECGRSFSKSSALISHQRIHTGEKPYECAECGKSFSKSSTLANHQRTHTGEKPYKCVDCGKCFSSKLITHQRVHTGEKPYKCLECGKFFRDRSNLITHQRIHTGEKPYKCRECGKCFNQSSSLIIHQRIHTGEKPYKCTECGKDFNNSSHFSAHRRTHAGGKAS

SEQ ID NO: 928 - DNA, 44617 bp, Mus musculus
  misc_feature (1)...(44617): n = A,T,C or G
caaaggttacactggtgtggtccctcccagaaagggttgagtatctggagaggaacctaagacgcaagagcacacagcaaagcaaggcacagtcagacataggactttgcttccccactgtcccctcatccatctgggtcttaactctacagtccctgctggccccgaagtcactgtggagatcaggctgtcgagaactcagagattcaaggcatataccaccatgcctagcctgttactgattggtgtgtgtgtgtgtgtgtgtgatgtgtgttcatgtgtgtgtgacatcaggtgtcactttctattcagttctcttgagaaagaactgtccctgaacatagagcttgctgacttcacccacctacccaccccccaacctctgtatgccctggctgggtcaccagcaatccctggggatcttcctgtctgctctcagtgctgtgcggggccccagccagtgttgtggggcaggaggtgggggttgcaggtgtgcaccacacacgctcagcttttaccaggatccaggtttgaaaatgctctcaccactaagttaactccttccccctatttgctttgtcgtgggtcctgaaatctacccttgaagatacggttatcttagctgtgcctggtggtgtgggtctatcatcacagctatttaaaagactgaagccaaaggattccaaaacttaggctgggctatggactgagttcaagcctaggcaacttactgggacccagatacacacctggatgacctgatacacacctggatgacctgatacactcctggatgacctgatacacacctggatgacctgatacactcctggatgacctgatacacacctggatgacctgatacacacctggatgacctgatgcacacctggatgacctgatgcacacctggatgacctgatacacacctggatgacctgatacacacctggatgacctgatacacacctatgaatcctagcacttgagagttttaaaactgggggttgggggggcgttgatgagaatatacaagaccaatgtgggcaactgtgtaggaccccatctaaaacaaaaaagacaaaacaaaactgagccagcaagattgctcaatggttaaagctacttacccctgagttcaagaacctacataaaagatggaaggagaaaactgagtccacactgttgccttctgttctccacactcttcatagggcatgtgtgtgctgccttcaacaacatcaacaataacagtgaaaataaaatcttaaaaacaattgaatgccagggcctagcaaacacagaagtggatgctcacagtcagctattgaatggatcacagggcccccaatggaggagctagagaaagtatccaaggagccaaagggaactgcaaccctataggtagaacaacaatatgaactagccagtacccctgagctcttgactctagctgcatatgtatcagaagatggcctagtcgtccatcactggaaagagaggcccattggtcatgcaaactttatatgccccagtacaggggaaagccagggtcaaaaagtgggagtgggtgggtgggggagttggggaggagggtatgggggacttttgggatagcattggaaatgtaaatgaggaaaatacctaataaaaaatatttttaaaaagatatacatatgaagaaaaaaaacaattgagtggactgggtgtggaggcgcacgcctttaatcccagtactcgggaggcagaggcaggcagatttctgagttggaggccagcctggtctacagagtgagttccaggacagccagggctatacagagaaaccctgtctaaaaataaaaaaataaattgaatggtaaaattatttgtgacatactaattgtaaagtttgtaagagctattcaagggaagccacagaccaaaggacagagactgagggctggagaggtggctcagcagttaagatcactggctgctcttctgaaggccctgagttcaattcccagcaaccacatggtggctcacaaccatctgtaatgggatctgatgccctcttctggcatgcaggtgtacatgcagatagagtattcacattcataaaataaataaataaaataaaataaagcacagagactgtataggccaaagagcatctctcactccaagaaagggagggcagggaatgtatggcatcaggaaaagattgccaagacaggaaaagcagtgagcccatttctagaaacacctccaaagagctgtcccctgacctccacaacacagagagggagggggagggggagggagagggagagggaaacgtccggagggatggactggatggggcatacctttaatctgatcaggagatggagctaggccgatctttgtgttctaggccagcatgacctacaatagtgagttccaggaagaggaggccgcgggagaaagctgacccatgaaagacaccccatgggggagaaggattctggctggactgacaaacggggcggaggacagggtaccagagctcagcagagaggatgaagagcctgagcaggctcctctgctagcaccgaccagtgcagacgtgcgtgcgcacggnnnnnnnnnnnnnnnnnnnngactgacaaatggggccggaggacagggtaccagagctcagcagagaggatgaagagcctgagcaggctcctctgctagcaccgaccagtgcagacgtgcgtgcgcacggacagaaatccagggcgagcttgcctgcgtggagggttcaccgtgacgcgtgtaagcgtgtaagcaggggacggcagagggaaggtgtgtgtctcctaagcctgcaatggagaacggagaacgacgtggtgatcccatccatttcccgttccaggaagcccgagctaggcctctccagaacttctccagccagctcaacacgcacagagtggctcctacccagaacctgtgccccagcaaatggtagcaaggatctcctccctctcacccagttcccttaacacttgagtaggacctgtactttgtttgacgtggctttcttccatggccgcctcttcctggaactcactattgtaggtcatgctggcctagaacacaaagatcggtgtatctccatttcctgagtagattaaatgtatgccccacccagtccagccctccggatggttctctcctgcgctcccccctctctttccctctctcagatcaccaggtatgtacaccaagggtctttactcggtgaactctctctcttgggtcctggcactgaccctgtcctgcctcagcctctagagacttaggcaggggccagtgcactgggctgtggtgacctctccttgaataccattgcaagaggagagaaatagactcaacccttagatacaataagggccaaaggaaggctttggtcctagaagctcaacaaggggtctgtagatgcagttaaaaagggaagacaccaaggtcagttgactctggcttaatggcaggccaggagttttcacctccgaggtgaaagctaaggagtttcaaatgtcaaaggtcaaatgtcaaaggtcaaatgtctaggagaccatgacttagtaagatgttgttgttgtttttcaagacagggtttctctgtgtagccttttgctatcctggactcgctctgtagaccaggctggcctcgaactcacagagatctgcctgcctctgcctcctgagtgctgggatgaaagcctaaagccgtgtgccaccatgctggaacacaggatttgttcgattgtttttgtttggttttaagtagagttaattgtattgagaagatgtaagaaagaactccagagagtgtgaggaactccatgggaggaacaaccaggcttctttctttgtttgagacaggggcccactcaaggctatcctccagcctcaaccaccccaggactgtcatgacaagtgtgcaccatggagtcttcctgtagtgctctctgctaatactcgatagagtagggcagagccaaggccaaagcttagctgaaaatacgaggaccctgaactgaagtctggtcaaagagaatattcatgagacacatgcatttatcttgtattcacacttctctctaccacttacttttttttttatttctttctttgttttttgcatcagaagatttcttattcttgtgcaagtgtgtgtatgtagagatcagagaacaacagctgaacaaagccaattctctccttccacaccccttggggcctaaacagctcagccacagccagtagatggcagcacgtcacagtacgaagccctcagggtgatccactgtaataggagtgggaggacttgtgttctgagtggacccagccaggtggacaggatacaaaggggagatgctgggatgcccttattgaccacgtgacctgaggtgggctcaaggcccgcagcagggcctcacttaggagctggctaggaatgtagattctttcttctttctttctttctttctttctttctttctttctttctttctttctttctttctctctctctctctctctctctcttctttctttctttctttctttctttctttcttcttcttcttcttcttcttcttcttcttcttctttttcttcttcttcttcttcttcttcttcttcttcttcttcttcttcttcttcttcttcttcttcttcctcctcctcctccccttcttcttcttccttcctcctccccttcttcttcttcttccttcctcctccccttcttcttcctcttctcccctcctcctcctcctcctccttcttcttttccagtactaaatacaaggtctttatctcttccagattaaacattttgggtgggctggagagatgactcagtggttaagagcaccgactgctcttccgaaggccctgagttcaaatcccagcaaccacatggtggctcataaccatctgtaatgataactgaatctcttctggtgtgtctgaagacagctatggtgtacttacatataataaataaataaatcttttaacaaaaaaattaaagattttgggtataatcatataaagataaagaatcaagttttgcgacctaaaaacatttactttttaaaagtatattaaaccgtggtggctcacgcctttaatcccagcactcaggaggcagaggcaggtggatttctgagttcgaggccagcctggtctacaacgtgagttccaggactgccagggctatacagagaaaccttgtcttgaaaaaccaaaaccaaaaccaaaaactatattaatactctagtaaactatacaaaaatataaggtgacaaacatgtacatttatagaactgcatatcagtcaggccagatcctgcagaaggaattcccagcatggcctcattcatctgtgaggacacagagcagtccttgtttggccagacaccatcttctcctgcatgagctgctcttcacagcttgatggcttccttccatagttgtctacctctcaggacagacatttaccttcctcatccaccaaccattggaggagggcctgggccacgaagatgattgattccacccattcttggtggagggtttcctgatgggaaaacaaaaaacaaaaaaaccctacaaatcctgctattccccccagaagaaatctgttatgaaagacagtctccatgggaactgattctggctgcccagcacttgaccatttgagatataaaccaactttcctccatttacctgcttcctaaggacagagaagtccggacctcctggggttgccgtacctagcctctctccacagattcttgacccaatcctcccacctccagccagaaatcagagtcagagtcagagtcagggccagcaatctgtttgtcaggtccctgggtgattcagatgtgtgtggaggttttaaaggtaccttttctctccaacttcctcattccaggaatggggaaattgagaccagatgaaggaagtgacttatcacaccagagagagcccaggaggtggtggtggagtagcagaggggcggagagatgcctcagcagttaagagagcttgctgcgctttcagaggacctaagttgggttcccagcacccacatgacagcctacaaccacctctaactccagtttcagagattcagagattctttacatattcttaaaatttcaatctctttaaaatatccatctcttttaaaattcaaagtctttttacaattaatagtctcttaactgtgggctccactaaaacagtttcttccttcaagagggaaaatatcagggcacagtcacaatcaaaagcaaaagtcaatctccaactgtccaatgtctgggatccaactcacgatcttctgggctcctccaagggcttgggtcacttctccagccaggccctttgtagcacacgcgtcatcctctaggctccagatgtctgtactccactgctgctgctgctcttggtggtcatctcatggtacttgcatctccaaaacactgcatgaccccttcagtcctgggccttcaattgcaactgaggctgcaccttctggcttcctcaagtactgcacatggacacacacacatggctgaagagatggctcagcagttaagagcactggctggtcttccagaggacctggcttcaattcccaacacccacatggcagctcacgattgtctaacatctgttccagggaatccaacaccctcacacagacatacatgcaggcaaaacaccagtgtatataaaaatacaaataataagttattaaagacaataaacacacttcaataataaagtacataacttttaaaagagagaactcannnnnnnnnnnnnnnnnnnnctcttaaccactgagccatctctctagccctcaaacatttctgctgtattctcacatgctgaatctagcaacattacccacagcataaaaatctccctcctgaagaagccctgaccatccctcctatagagaagacttcatgtggtggtcataagattccacttaaggagctggtgagatggctcagtgggtaagagcacccgactgctcttccgatggtccagagttcaaatcccagcaaccacatggtggctcatagccatctgtaacaagatctgacgccctcttctggagtgtctgaagacagctacagtgtacttacatataataaataaataaatctttaaaaaaaaaagattccacttaaacattttatctaatgatagctgtaaaaatgtatgaggaagatacaataccagagtatgttctagaactggacattagaaacatacttcctaagccaggtagtggtggcacacacctttaatcccagcacttgggaggcagaggcaggcagatttctcagtttgaggccagcctggtctacagagtgagttccaggacagccagggctacagagaaaccttgtcttgaaataccaaaaagaaaaaagaaaaagagagagagagaaggagagaaagaaagatagaaagaaagaaagaaagaaagaaagaaagaaagaaagaaagaaagaaagaaggaaggaaggaaggaaggaaggaaggaaggaaggaaggannnnnnnnnnnnnnnnnnnngggctgtctcacaaatcacctaattaacaccctaacaccctgttaactgttcactgtaacaaaaaaggaaaaagtttgttccaggcctagagatggaagctaagggctgctcacctgctgggcaagtactctaccacagagctacatccctagccctgaataactcttagtacatacatatctcaaacatttctctttttttgtttaaagacttaattattatatctaagtatattgtagctgtcttcagacacaccagaagagggcatcagatttcattacagatggttgtgagccaccatgtagttgctgggatttgaactcaggaccttcagaagagcagtcagtgctcttaaccactgagccatctctctagccctcaaacatttctgctgtattctcacatgctgaatctagcaacattacccacagcataaaaatctccctcctgaagaagccctgatcatccctcctatagagaagacttcatgtgatggtcataagattccacttaaacattttacctaatgatagctgtaaaaatgtatgaggaagatacaataccagagtatgttctagaactggacattagaaacatacttcctaagccaggtagtggtggcacacacctttaatcccagcacttgggaggcagaggcaggcagatttctcagtttgaggccagcctggtctacagagtgagttccaggacagccagggctacagagaaaccttgtcttgaaataccaaaaagaaaaaagaaaaagagagagagagaaggagagaaagaaagaaagaaagaaagaaagaaagaaagaaagaaagaaagaaagaaagaaagaaagaaagacggaaggaaggaaggaaggaaggaaggaaggaaggaaggaaggaaggaaggaaggaaggaaaaggagaaaacacacttcctgggatgggatgagaccaatctgcagagttcttactctgcaagcatggggccctgaggtcaatcccctggaacccagctttaaaagggaaaggtgattcagtggttaagagcactggctgctcttccacaggacccaggttcaattcccagcacccacatagctgcttgcaattgcctgaaaccccagacccaggagatccgaagcctcttctgatcattgagggcaccaggcacacatgtggtgtgcatacacacatgcaggcaaaacactcactcacatgcctatatgtacatgcatgcacacacatgcacactcacatgcacacgtgcacacacgagcatccacaggcacatgcacacatgcttgtgtgcacataccaggcatggtgaagaatactataatcccaacactgggtagatggagacagccagcctagccttgcgggtgaatcctgggttccagtgagagaccttgcagcaaaactcaaggtagatctaggaggatacaagctggcattcaactgagccagcaactggccccctccacagttcttgctatgtcttcatagcaaattcctctgttagaggtaatgctgtgtggaatggtgtcttagctagggtttcgttgctatgaagagacaccatgaccaaggcaactcttacagccaagcatattcaaaccaccacaaatagcaaacaagcctagcttcaggtacctgcttgggttcctgccttgatgtctctctcaataagaaactgtcacctgcaagctgaaataaacacacacacacacacacttttgattttctgctttgtgatttttgaggcagggtctctatttgtagccctgaatgtcctagaatttgctatgtagaccaagctggccttgaactgcctctgcctcccgagtgctggaactaaaggtgtgtgtcatcatgcccagcttctgaacttgcttttgtcacagtcacagaatggagcagaaccaggagccagcagcgttcattcatgtcatctgccaacacctgcaggcatttgcatctcaaagctctgggcgagagggaggaggcatgaggcacacacatagcctggcacatgtcacagacaaaaggatgtaaactttacagaggtcaagtgagttgcaggacagcatacacccggggccagattagaacccaagtttctggagtctaaggtctatgcctatgccctcccctggccagagttcctaggaagagagaattcaaccgcagggcaagaacactgtggcactgaggacccagaggggaagtggtaaccggtacggaaggccagatctcctctcactcacttatctgcaccagacctcctctcattcactcatctgcgaaagtgtgagagcaagaaaccccaggctggagctgcagctcttgggacctacgtgggggtccctgctgggtctccagatctggatacagaatagccaggacaaggctccacaagaccctggggcccagcggctgacaaatgacagtgagtgtaacttcctttgttgttttacttcagactcctcgctccagaaagcctatgttctaacctcaactcttccctaactcttcgctaagtaaaagggaactgtctgaggcagggggatggatgtcggactgggaacatgggtcatagctcaagactggttctcctgagatagaattttccttgcctttcttcacagtaataaacccccaaaacttaggtggcctttttgggggagtctatttctatttacccctgaaacagatagccactctaggccaaagaaaatttgcttccagtccagcttagtgaatgggacaaatttattggtgttgtctgtaggaacatgggtggcttgggcaactgtatcatcaaaaagcctaccccagcatggtgacaagtgcccaaagttagtgacatcgctggtgtccccattagttgacagtccacctctaagcagcagacaggacggtgtgcagggatgaagcaggagggagggatggagtgttggaacgtcaggggagggtctaatgaccccacacacagggactggtacaggcacgattttttgaaggcctcctgtagataatcaaagctgttgtaaagaaagggccacacaagcccagggaacagaattccacgccacacagatcttctctgtgggttgggctctgctccaaggccctttcaaggtttcctttattggctgctcacaagtcaacctctgtggttaaatgctaccctaccccacactcggcagagggaggctgcgtgctactcccctgaagtcccaggggcatctcttgagaatattggcttgaatatgagtattttggcttcctggtctactctactgggccatccatagcaggtgggggtttgaaaaggactccagaagactaaagccttgggactcacctgggcaatctgaagcctgtggggttttgtttgtttgtttgttgtttggttttggtttttcaagacagggtctctctgtgtagtcctagctgtcctggcactcactttgtagaccaggctggcctcgaactcagaaatccgcctgcctctgtctcccgagtgctgggattaaaggcatgtgcctccacgctcggcttgaagcctgtgttttatagaaggaaaaaaaattgaggtgcagtgaaatgattggctgtcagatacgacgacaggcactggactgtgagacccgggctttgcttccttggaagtcactcttattgagggaagacagatgtcaaggtgggagtcctggggcggaggctcctgtttaatcctaactcttaacattctatggcttggcacaaataactccacttctctggccctcagcttttccttctggggcagagcaggtctgagaacgccaccctcaggcttgtggtcagggctcagccaggtgacactggttagggagagacaacggcactggggctccgtgaatagctttggtggagagtttggccttgtcccctctgcccatgctgtggactagaaatatgaaaaggaggtaccacttccttccctaggatagaaatcggtctcaagagagatgtgccatggtcatgaaagccaggactgggcagaagaagggctcatgacagactcaggaagtctgggggcggggggaggggggagggggacatggcctcagttctgcagttgcttgtggctcaagggagcttgctccctaatctgtgtggtcccatgcgtgtgactccccacctgtgaagcaacccttcctctctcctcagttaaactgccaaaatggctgcctccccatctcactgttccctgttttatttatttgtgtgtgtgagagagggtgcatgcccctgtgtgggtaagcttgtggaagtgagacaggttgacattgatgtcttcttcagttgctctccatgttgtttcttgagacaatttctctctgaacctgaagctcactcagtcagcaggtctggctggccagagagtcatgtctccccttggctgtgctgggattacaggcgcattatcataccaacttttttcctgtgggccctggggactccacagaaggtcctgtgcttccatagcaggcttttaaacagctgagctgtgtcctcaactcttctgcccccgttactctgactgcgtgttctaagggtgcccgaaccttgtattgattctgatggaatccaatagaactctgagcatcaccctgccaagccagtgggagtagcctcacaggtcacatagagagcttcactaatactctgacaccaacaaaagatacatttggtccttaggtcggcgtttccctgctgggtctggcctcaccattttgctggaatagctgtagtcccagattcattgtcaagacttaaaacacctatctcgctgggcagtggtggcatactcctttaatcctagcacttgggaggcagaggcaggcagatttctgagtttgaggccagcctgatctacagagtgagttccaggatggccagggctacacagagaaaccctatctcgaaacaaaacaaaacaaaacaaaacaaaacaaaaccctgcctatctctaatatttgactttcagcaatctcccctagggagcccctttccccaaactttccagggatcagagtccacctagcccccagctacatcccggaggggcccacatccccgaatccctctctagtccaaggcgttttgctcccgcccacctgagcatcagcttcacctccctgagctggattctctcaaaggactagaagagggattttcaagcagcctctgcttatgattgtgaaaagccctgaaggccggagacacagaagtctgtctgcagagagatagacagcgttattgtacagataaggagaacaaggctcagcagcagtatggacttgcacaatgtcacttagtcaaagcagtggggagtggcaggcagacgctagctagtcttgtgacagatccaagccagcctccccggctaggtagttgacgtcatttcctgaacctctgtgtcttcagctccaccaatgcagcctgtggcagctcgtggccactcgcaatttcaaggtggaaatctgaagcccaccgggacttaaaagccacctgagttggtgggttctcaccccagagacacagagctcaaggccagtcagggttatttgtgaaagaaaccatctcagttaaaactagcaggctggtcttagccaagccctgctctgtcatgagagtgaacagctggacaatggtagagaatccctcataggtgtgaagacccagtccaggtcactgctgtcacataactgtcccttgtagaacaggttttgttttttttttttttaagatttatttatttattatatgtaagtacactgtagctgtcttcagacactccagaagagggcgtcagatcttgttacagatggttgtgagccaccatgtggttgctgggatttgaactcctgaccttcgggagagcaatcgggtgctcttacccactgagccatctcaccagcccgtagaacaggtttttgatgccatggtatgtgcagctcgagagcagggccacagtggagagggaagcatactgtgtgttaggccctgaggttccaaccacaaacccaggggtttcctcatcccatggccttctccacaggacttccctctctgggcttgtggctgtcactgacattagctcgtaccataataccctgatcctacgaggacactttccccctgtcccaagacacaagtgagggagtccagggtttaactgcttagccaaggccaaagcaggagccccagcaaaagcagggtgtttggtggtggttttcctgggattccctccttggtctcccccgaccccctgcagagccccgaataggaagaaattgtcctttcttccatctcctaggaaaaagaaagtcccactgtaatggcttgtatatgcttgacccagggagtggcgctattagaaggtgtggccttgttggagtaggtgtgtcattgtgggtgtgggctttaagaccctcatcctagctgcctagaagtcagtcttccactagcagccttcggatgcagatgtagaactctcagctctgccttgcatcatgcctgcctggatgctgccatgctcccaccttgatgataatggactgaatctctgaccctgtaagccagtaccaattaaacgctgtccttataagagttgccttggtcatgatatctgttcacagcagtaagaccctaactaagacacccacaatgcatgcctcacccaggcggtgaagacccccaaatgctaaggaggacagacaagcgaggtgggtgatgtgggtaggaagaagaaggggctgcagtggagtcgggctagctgccaggatccaaagaggagaggacctcactccaaagtgagtattaggctttacaggttgggtgtcctctaaggtttgtggcttctcttctcctctcctcccctacagctttctcgcactgccagacggggcagccttgattctatggctcccaggggctctcacttaaacccctgctgccctgttgcggtgattcccctggctccctaggggctgtgcccactcagttcctctttgagaaccacaggtgcattcacggtggtgcttctgtccagattcaatgagtccttcctgtgtctcccccccctccccgtgggtgtgttggggtactgggtggtccatcggtactacaggtaggggtttggggggacctatggagaaccacacatgtttctggaaaacaggtcaacagctctggaaggtgctttgagatgtaggattgcagtttactagggacttaggagagaggtgtgacttcgggacggaaacaagccaggagcatcccacaccccaaaagcaagaagaaggggttcatagactaagttacacaaaggtagagaggaaccaaccagcgtgtatctggcctttctcaaaaactaagaacgtgtgaaagttaagttaagggacaatctgggtgtcagggaagtgaccagactaaccagaacaaaatgcttggctattttggttttttttaagatacagtatagcccaggccaacctaaaattcaagatcgtcttcgccgggtgtggtggcacacgcctttagtcccagcactcggagggcagaggcagatggatttctaagttcgaggccagcctggtctacagaatgagttccaggacagccagggctacacagagaaaccctgtctcgaaaaacaaaaacaaaaacaaaacagatcgtcttcatcttccaagtactgagattataggtgtgtgctatgtttcttagctttggaaaactttttttttcttaagatttattatgagggctggagagatggctcagtggttaagagcactgactgctcttccagaggtcctgggttcattcccagcaaccacacgagctcatgactacctgtaatgagatctgatatcctcttctggtgtgtctgaagacagctacagtgtatttatttataatcataaataaatctttgggccagagcaagcagggactgagcgagcagggccaaacggagcgagcagaggtcctaaattcaactcccaccaaccacatgaaggctcacaaccatctgtacagctacagtgtactcacatacataaagtaaataaataaatcttcaaaaaaaaaaaaaagaaagaaaaggagaccaagagtgatggagagataaactgcaggcatccacacgcgtgcacacataggcacacatacgtgcatacacagcacatatatgcacagacaacacaggcggaatgaaaaataaaataaaggtagaaattcaggtgttgggggctcatttgggacgataagatctctctctattgtctagcctggccttgagctcactgtataatccaggctagcctcaaattcaggtccgaccacctcggcctcctgagtgctggattacaggcacataccaccgtatccagccatacattgacttttaaagcaccaaaccacaagaaacgtggatcctcacttctgctatctacagtccttttggtccacactaatgccttgtgtgggttcatctggacattttactaacgtttgttggtttgtttaattaaagacagacgtatttatttatttatttatttatttagatttatttatttattttatgtatgtgagtacactgttgctttcctcagacacaccagaagagggcattacagatggttgtgagccatcatgtggttgctgggaattgaactcaggacctctggaagaacagtcactactcttaaccgctgagccatctctccagcccagacgtatttattttacgtgttttgtctgggtgtagtgtgtgcaccgtgtatgtgtcaggcgcctgcaaaattcagaagaggaaaagagggtgtctgactccccggtactggagttaaggacagttgggcaccacatgttggtgctgggaatcaagccctggtcctgtggagagtcaccattgctcctaaccgataagccatctctccaggtcctttgctgttgttcttaatttttaataatgtctgcctgcctgtctgtctgtctgtctgtctgtctgtctgtctctctctctctctctctctctctgtatgcattcaagtgcaggtacccaaggaagctagagattgctgatccctctgaggctggatggtcttacaggcagcaatgggcagtctggtgtgtgtcactaaaaccagactccatcctcctcgagagcagaggttccagcctccggcctgtttgtaccagagcttattgggtgcatgatcttgctgtaggcaagcttggctgttagtaattttctactgcaaacttctggcacatgccttggatcccagtactcgggaggcagaggcaggtggatctctgtgagaggccagcctggactacaaaatgagttccaggacaaccagcgttatacagagaagccctgtagggggctggatgggagccaggctatccatgccggttatggttcctgtctgtttgtgtattttctccatttggctacttaataatgcagtggatccaaactttacacagcgacctaagagagtggagtccgacctgaccatcctgggcctggactcaatggcttgagtcccaagggtgtgaaaacgcacaaaccccagtgggaattgttgagtcttctcatcacttcctgtggctcatgagaaaggaagtgatttgaagtcaagtctactattttctttcttatttttgagacacactctcactgtgtaaccttggctaagctagaatttggtatgtagatcaggctggccccacagggatccgcctaggtctctgtcctgagcaatgtggttagagaagggagtaccccaacacctccagcaaatgtgctgtttgcagtaagagtaccatttgccctttcttcctcccccacccttaacatcagatttaaattcatgtggttgggatgtagcacaggggtagcatacttgcctagcacacatagggcttggtttgattcacagcactgccaaaaacaaaagggtgtgtgtgtgtgtgtgtgtgtgtgtgtgtgtgtgtgtgtgtacatatagnnnnnnnnnnnnnnnnnnnncttagtgtttaagagtatgtttgctctggtaaagcaagttcaaatcccagcactcactccagcttgcccactgtagtaagcctgcctccacggaatccaacggcactcacaagcacacacacacacacacacacacacacacacacacacacacacacacacacacaagaaataaataataaagtaaatcttaaaaacaacaagccaggtgtgctggcacacgcctttaatcccagcaggcagatctctgagttcgaagccagcctgatctacagagtgagttccaggacagccagagaaagcctgtcaatcaatcaatcaatcaatcaatcaattaattaattcttatcaacccaggctggcctcaaattcccagcagtcaccctgtttcacccttcaggggtaggaggagcgtgcagaaagatctgtcctccagactcagctaactctccatgacaggactgtccctgcttggcttaattcatccatcagctactgtcctgaggtttctgggtccctgacagctactttgtcgataccagatcctagcagcccagagcccttgagtacgttttcccagcaagatgtggcatggcttaacagtgatactgccaccaccatcacccctaagattgtgtcacaagtgcccttcatggctcacagtatccagactcctcactcaacactgacagcaatggtgtggttattgtcgtaacacacagaaggtttgaaggcacttcacgtccctttcccacaccctctcttctgttgggggaacctgtctgaactgcacctcccactctgatgctgcgatcatttaaatcaatcaaaatcaaggctgggtagggaccccactctgtgaaacctggacgaggcaggaagaggtccagagccatcagggaaaaccacaggggatgaagaaaaagccaacacaagtcgaccctgtcccatccctgagttgcagagggaccactgtatgtatgaagactctgttatccttccactttgatgtccccctggccttactacctgacttgccagaaaagttcccttcctacatagagcaaattatggacagagtggtggtcactccagggatggccacacaatggcagtctgccactcaggtcccctcgctcttccctaacaaaggtgaagaccccagcacacagcttaggcacggagaaggagggagccaccccagacagcctgtcccacctctgctcaccaagtctctctggtgctttttggttgtttggtttgagacaggatctcccttccctatgtggctctggttgctctgctcctaggtagccaaaaatagttaccatctgaacattacaaatgaataattagattaaaacaacataggagctggaccagctactcaaaaggcagaagtagaatgatcgtgagttcaaggctacacagcaagtgcttgtccctaaattaaaaaaagaaaaggaaaaagaaaaaaaaattaaaggctggattggccaggtgtgatggctcatacctttaatcccagtactcaggagacagaggcaggaggatcactgtgagctacagcccagcccagtctatgttgtcctggccacattagtgtgtgcatctcaaaagaaaaaaagggggggggagtggatctggggatatgatttaggtggtatagtgcttacctggtatgcaggaagctctggttgcaaccaccaggaccacaagaaaaaaaaatgatatgaatttgaataacaacagcaaaaaagggagggtgtcaacacacacaagccccttgtgcctgccacgaaggtgctctcttcatagacttgagccacagtggcctgttcagcaagctgagcctaagcagctattaatcaggcagtaaggaaatgttcattaaagggatattcctatgttcattaaagggatattctttctggctggagagtcggcttagctgtcaagattgagtactgctgtggcagaggacctgagtttgattcccagaacctgctgctgctgctgctgctggctccgcattgcctgcaactccatccagccacagggtcctctccctctgtcttccatcctcacccttctctcctgcctccagctcttccctcactagcctgaaggcacaacaaagatgactttgtggtccatgttccctgtcaactgtgagaggacttgaaccaggcacggtggcaggcacagcatcctgtagagtttgtcacacctaacctcacaggtgacataaggactccttctgctcccctttctttcttaatatctcagcctcctgccattacatctaactaaaaatagcatgtatttttaaaatggtcatattttcattctatgtctgatgtacgtgtgtgtccctgtgtgagcatgtgtgtgtaagagcaggtgccccccaaggggacagagatgttgaatccccaaagtccttagatgacagctcaaggtttagggacatacaccttccctagaatatcttatcaatgagccgagcctgatccagaggaaatgctaagttagcttatagtaagagcggagttcgggctggagagatggctcagtggttaagagcactgactgctcttccagaggtcctgagttcaaatcccagtagtcacatggtggttcacaaccatctgtaatggggtccgatgcactgtgtgtctgaagagagtgacagtgtactcacagatataaaataacaacaacagagttcagaaaaggatagaatgcctctcaaggcctgagaactgagaaagaaatcttaacaagaaaacaaaacctaaagcagggtgaaggtgcacgcctataatcccaaaacttaggaggcagaggcagctgggatctctctgagtttgaggtcagcctggtctacagatcaagttccaggacagccaggatgacacagagaaagcttgtcttggggaaaaaaaaaaagatcctcgccattctttgccttcgcccattgaggcttttattgacagaggaaacttcattctgcccaggattatgtgagccttgggttcaaagactgcccttttccttcttggaagaaattgttgagtttcaggaatcgccccacaaaccacacaaacaccaatctcagttagacagggatgctttattgaatgtacaccctaagactgatcagggccatagcctagggagctgaaagctacgaccctgaacatttctcagagccagcttataaaggctcaaacggtaagacccacaatgctgaaagtgctgcccagtggtcagccctgactcaagctattttagacgtaacagttcatacagagctttaattggatggctcctaagtggagctgtgggagtggctgtgggatttcttaagattaacaaagcttgtagcatacagaacacaataggagatgtgatcagcatggccctgctctgggtcacttctctgtgtcaatggctggcaggcatattacagctgcaatatgaaatagctggcagtcatggagcaaaatggttaccgatatagcgaggggttggctcaacttcaaagtaggttaaagactgtttctcctctgtggctgcagagtcaagatgtgtgtttgagataagagacagcggacacattggacacattttagtgttagttgcttcaggctaggaaggtaggaaggcagagttggttgcattcacaaacctcaatgtaccctttagcttgggggccaggagagggctctgaactgctattatgatcaccccccaccccgttttccttttaaaaacaaggtctcatgtaacctagactagccaaaaactcactctataggatttcttattttcctacctctctcaagtattgggatcacaggtgtgtgtgtgtgtgtgtgtgtgtgtgtgtgtgtgtgtgtgtgtgctatgtgccaagtttatacagtgctggggatcgaacccaaggctttgagaatgctatgcaggcactctactaattgagcgatgttcccagagcttttggtgacttcttttttttttttaatgtgctttctttttgtgtgtgtggcaggttcttttttttttttttaatttatttattacatgtaagtacactgtagctgtcttcagacacaccagaagagggcgtcagatctcattacagatggttgtgagccaccatgtggttgctgggatttgaactctggaccttcggaagagcagtcgggtgctcttacccactgagacatctcaccagcccttttggtgacttctttgaggtttattttgtgtatatatgggtatcctgcacatatgtctgtgcacatcgtgtgcatgcagtgatccagaagaggacattggattctatggaaatggtgttgctgacaattagtagctgccaagtgggtggtgaaaatcaaacccagatcttctggtcgagcagccgtgctctaaccacgaagctttccggcccctgtcctttctggtgagcagtttgaggattgcttgctgtatcttaaacacgaatggtaacacaagcgtttgaaaggggttttgtttgttcattacttttactgtgtttatgaatgctttgtctacatcatatgtatgttcatcatgggtacgccttagccatcagaggccagaagcgggaatcggatcctctggaaacagagttacaaagagttgtgagcctgctatatgatcatttgggattgaacctgggtcccccgaaccactgagccaacctaggtgtggcacacatccgcaatctcaacatttgagagctagaagcaggaggagctgtagttcaaggatgttcttagttacagtagatttaagtcaagcctgggctacataaggctctgttgttataacaattaattaacaacaacaacagcaacaagaagccatcttgaaattgtctctttcagactcagcttcccctcccccaacagcccagtgctcttttctgctctgctctaacaccgcccaaatctctgaatatttctatgtaccaatttcttcatccacaaatggagaaaacagtgttacctatctttggtgcccatgctgacatttaaacaagactgtgtagcctggagtggtgtttaatcccagtacttgggaggcaaaggcaagtggatctctatgagttcaaggccagcctggtctacagaacaaattccaggacagccagagctacataatagagagaccgtgtctcaaaataaacaaacaatgtgtagagcatagttcaataccaaactgttgtcatggtcctttttgggcggccattctgggtccagagaagaaatggcttctcacagaactggagccaaagtcaaggctgagactctgaccacgccgggatccttcgttttgtgtcacattggcgccgtcttccggtccctctggctgccatgcttctgctgttgctgcaactgcctttgtatgtatgcatgtagttgtagaggtcagatgtcagcctcggaagtccggtgaggtgatgatggtaagtagaaagcaggcttgacatgaattgagcttgaccatgcagaatcctgtgacaactaagagatgccagaagaaggcatcccagtggagatgggcatggcagctccatacaatacaaaatccttcctaactgtgggggagaggggaggctggctacactaagtattagtggagtgaaggtctgggtaggtagctcagtggtagagctcttatctaacatacttataatatgtatatatattagaataatattaatatatagataccattagactaatatatcactactaataatatataataatatgatatataactaatactataggcttatatatcatatatgtatgtatgtatatatatatatatatatatatatatatatatatatatatttacacattcagtacactgggatccagagactcaggaatcaccatcaccaacctgccctctttaaagatgagaagaaaaaaaaaacccagaaggagaagatttagtgaagagacaggaactagaacacagtccctcccctcccccttcccagtcctaggcaaaagtaaccaggctgctgggatatggctcagttgaagagcttttccttggtatgccaaaatgctctgggttccatccccagtacacacacaaaaattaattcagtttttttggaggcatcaaatctcagtttcccatggtgggtgctgaagtcccaggcttccttccgggccccctccaccagctgagcagaggcagaggccatctcttctgtgaccctgtttcacttcacactttcacttcacgtgaaaacaacaacctgccacaccttttcctgagagttcccagacccccccccccggggtctttcccagaaagtcagatcgagtccgggtcccagctacagcctcagacgtccagcagcagggacacagtcaggaacccgagttcctggactaggcatttcctggaggtgtggaagccaaggctggttggctctctttcgtcctaacatctgttgaacatcagattatcgcatgttcgacatcatgtccttgtacacacctctggctgtgaaggtttggaagcgctttcttatcactaacctgttgataagaaagatgaattaccaggcctggcagaggctacatagcaagacctgtgtctccaaagcctaaatgttaggtgtcaaaaatctgaaacaacccaagcagtcacaagagtgcagaaaagcaagatctttctttgaattaagcagcagggcaacagtacagactcgggagctggctgcatcgtccctcttagtaaggatttaaagggatgaaaacagtgtatccaggccaccaccgattgatcagggccagagaaacagacccagcagctgacctgccaccccgagccagaatactacagagtttttaagcccaaaatccacaatcatctgtgccaagttaccccaccagtcaggatttagggataggggacgtccttaggaacatgtctttgtggtacacctatcctgctcccattggttggggtattcagcagtggcaggggacttgcctagcattcatgtctcaactggacagctaggatgtccgttaccaagggagctgctgggacttatactttatttgacccctatacaaagtggaatggcttttatttggttccttcaataataataataggaggaggatgagaagttcgaggatggctttgaacatattttgagttctaaaatagcctggactagatgtagccctgactccgaaaggacatggctccgtgggcgaaagggcttggcacacaagcctactgacctgatttcagtcccccagatgtagtcataataagtgatacatgagtaaaatttaaagcgaaaagtactagcaatgataataataaataaaacaaaataaaaaataaaacatgatttttttttctcctgaaaagatgtataggcattaggtttatatagttagttagttagttagttagttagttagttagttaagacaggtgtggttgtgtttagttaaggcaggtgtggttgtgtatgcctttaatctcggcactaaaagaggattaaaggagacaaggcaggtagatctctgagttcaagcctagccaggtttgcagagtgagttccaggacagccagggctacacagagaaaccctgtctcagaaaaccaaatagatggatagatagatagatagatagatagatagatagatagatagatagatagatagatagatagataaaatagttttaaaacatttatttacatttatttttatgtgtataactgttttgctttcatgtatgtctgtgtaccgtgtgtgtgcctggtgttagcagacagcagaactggaattaaagacagctatgagctgctatttgagttctgggaaccaaaccccagttccctgcaagaacggccagtgttgttaatctctaaaccatctcttccagccccatgcatttggtgtgtgtgtgtgtgtgtgtgtgtgtgtgtactattaattgcttttgagacagggtctcactatgtagctggccaggaacttgccacatagaacaggctgtcctcagactcatagagatctagctgcctctgtttcccatgtgctaagattaaagctgtgtgccaccatagcaagctggaaaggtcttatatacactttgaaaggatcaaaaagaacttgccagttcccagtttcaaaaactagaacgaatgtcctcggtgcgcttggcctccttaagaatgggggggggtattgttattgtctcttcacaagtgagaagagggacttgcccaaagtcacatgatgagagtgacagcattggacccagagcagctacttatacatcaaacacatcccttgccctagaaataggtcttctagaaggcacccatgtgacttgcagagggtatctctatcttcgtggagacagggagccgggcttcctgttgctgtgtgcatcctgttgttctcttgttaggatgtccatcaaatgcatgcatttcctttcctaactctggacagtaacagtcgtctgcggccaagctgtacctgaatgagcagaggcacaggcaccagccgtggccacccagcaaacatctctgctgactcagactggggtaaggcattccctaacagttagttagttagttaggtaggtaggtaggtagtttgagacagagttttgctatgttgtctaagctggccttgaactcattatgttacccaacattaaacttacagcagccccagcctcagaatttactagattctgacacagagcagtctggcctcagcctcctgagtgctgggattacaggtatatgccaccatgcctggcaatccctaccagaacttttatttatttattttacttaaaaaaaaaaacttttatttattttttaaatttttaaaaattttttatttttatttacttactattagtgtgtgtgggggggtaagatgtatatgtgggtgtgggtgcatgtatcagatatcgtgtgtcctgctctgctgatgtctaacgtactcctttgtaacaaggtctctggctgagcccagagctaggctggcagccagcaaactccagtgagcctctgtctgctccagacagtgctgaagttatgggtgtgtgtgtggccaggcccaacgttttatgtgagtgctgggaactaactcaggtccttaaggatgtcttatccactgagccatctctccagccaacacccttgcaacttgatttcttatattatagtgtcatgtggatgaaatcaaattatgactgggaataatattctttaattgtatcagagttttatttacgtattttgtgtgcatgtgtgtatgtatgcatgtgtgtgtgcatgtcacagctggtttctgggagccagaggacaacttgctttgttggctctgtccctccatctttatttgggtccaggggttccaattcaggttgtctggcaggcacctttaccaactaatctgtctctccagccccaggagcagcagtctgcagaaattaaattccatactctcagttattgatgtagttgaggggcaggcagcatgtaaaactgctggggagctgctgcatgggggaggggggggctttggaaggctccactgggcagagaagcaaaggtaagtcccgaagggctatgaagccagaggccagatggcacgtttttccagaagcagcagatggccagctgggtggggcttgggggctagagcggccctgggtacacgcctttgtagcacagtgcactgctttgaaccctttatgtttaggcagcccagtgcactgcagtgggcagtgtactgagctgccccaaaaacacacaacagaagtcctacatgtcactgaaattttccctgtctacatagggatgtggaaatacacacacacacacacacacacactcacacacatacacacacatgcattcacacactcacagagtctattctgagttaaaaaataaggaaaaatatgtcagtggtaaggcttttgtgaatgtgcaaggccttagatttgattccccagcaccacaaaaataaataaatacaaaacagagctgggcagtagtggtgcacacttgagaggcagaggcaggtggatgcctatagtttaaagccagtctgatctacatagagaggtcctgtctcaaataaataaaaaacgaacaaataagaaccaagaacaaaataaaatacattaaatgtgtatatcggtttatcagctcacagtgtctgacttcctctcttccttcctatgctgaatttcctcctgctaaaagataagtgaaaattttttaaaaggtctcttagaggacagttttatttggggggagttgattggtttgttgggtacagataaaactagcccttgctggctttgaactccatatagactgcaagttatttatttattcattgattttttgagacgaggtctccctaggccatcaggactgggcctgaactcagtcagtctgtaatccggacagggctcctgagtcgctgagacacagacctagtcaccaggtgtcctcctcttccttctatgtgggttaattttgaaataatacttattgcctttattaatcccagccgtgggaggcagaagccggtggatctttgagttcgaggccagcctggtttacaaagcaggctccaatacagccaggactacatagagaaattctgtcttggaggaaaataaaaaaaaaagctgggcagtcttggctcgtgcccttaatcccagcactagggagtttagggccagcctggtctacagaattagtttcaggatagccagagatgcatgggaaaaccctgtctcagtaaaacaaaattatatttgtttatttatccattcatttattctcgtgtgtgtgtgtgtgtgtgtgtgtgtgtgtgtgtgtggtggtgtgttggggaagatgccatggtacgcgtgtggaagtaagaggacaatttgcattctaccacatgaagcccagggattaaactcagtacatcaagagtttttctcaagcggggggtggtggcgcacgcctttaatcccagcactcgggaggcagaggcaggcagatttttgagttcaaggccagcctggtctacaaagtgagttccaggacagccagggctatacagagannnnnnnnnnnnnnnnnnnntttctctacctgtggagctatctcaatcacctctggcctttagttagttagttagttagttagtcagtcaattagttaattttagagttttggggtagcattggctgtcctggaactagctctgtagaccaggctggccttgaactcacagagatccacctgcctctgcctccagagtgctgggatgagaggccatgtgccacccctctcggccttttttaattctttataaagtatgcccaagagttgcataagtctcttgcaaatgggagctataacccctccagcagacatctgagaactcttgcttgtttgttgatcactcccgggcttataaggtcaaatttcatgccccctagatagaatatttccacataacctgtttagaaaatttgtctttttagaaagatgtttaatttgctatcttgtgaagtttaataatgcttcatacaatattcacttgttctaagttttttcttccaaatccaggacatgcttatattaaaaaatgattctttatgtgatgtttaaataaatgggacttctatctcttatctagtacagttactttttaagacagagtttcacagaaccaaagatgactttgactcgacccccctgccttcaccttccaggtgctgtgcttgagctacgttccctacaggagtataaaaaaaggttgtgttcgagacagggatttcctatgtagcccaggctggcctacaaactcacagagatctgtgtatgtcagcctgctgagtgctgggattaaaagcatgcaccaccactccataaaatatttatcttttagagtttatcttcccaatacttgaggtgaaaccaaagtattggctcccatccccaaacagttactaagcctttagtatcttaccaaagctggaagaacacagaaatcaaaatgagatataagccaggtttggtggcgcatacctgtctggaatcccagctgctttgaaacctgaagtaagagggtctacctgtgagaccatgtttcaaaaagcaaaagggaatctggccagcaagatggctttgagagtagaagtgagcagtaggaggcctgaaggcccgagtccaaatcccagaacccctggtagacctccacacacactctgtggcacactcatgcctgcaatacgcatcacatgtgagcacatatgtgtacacacacactaacaacaacaacaacaacaataacaataatagagaaaaacaatatccctacatcttcagttccacttcgaggttttgatctcttggctggtggcccctaggaattcccctgggtttcaaagggaagtttcaggatttatctttttagaaagcaaaagaccaaaacatcttgcaagttacttctgcttgtttggaaacaaaaagacttagcttgaggaaaaaaggtaaatgcttggcagcaaactataaatggatatttttggggttggtgagatggctcagcagttaagagctcttccgaaggtcctgagttcaaatcccagcaactacatgatggctcacaaaccatccataatgagatctgacgccctcttctagtgtgtctaaagacagctacaatgtacttacatatataattataaataaatctttaggctggagcaagtggggtagagtgagcagaggccctgagttcaattcccagcaaccacataatggcttacaaccatttgtacagttacagtgtaatcatataaataaaataaattagtctttaaaaaatttttttgtgtgtgctggtgtagtgttggcacatgcctttaatcccagcacgtgggaggcagaggcaggcggatttctgagtttgaggcctgcctggtctacagagtgaattccaggacagccagggctacagagagaaaccttgtctcgaaaaaccaaaaaaaattttaaaaattaaaaaataaatggatattttcggcacctgggtaaatgcttgattggtgtcagctctcagttgacgtcatcacctgttaacattcaaggattcttttctccttgcccacagcccagtcttctgggacagctccagtagaagaagccaaagcccatccatggagggatgccgggagacagaagtgaccaacggctccaacggtggcttggagttcaaccccatgaaggagtacatgatcctgagcagtggccagcagatcgccgtggcggtgctgtgcaccctgatggggctgctgagcgccctggagaacatggccgtgctctatattatcctgtcctcccggcggctccgcagaaagccctcgtacctgttcatcagcagcttggctggagctgacttcctggccagcgtgatcttcgcctgcaactttgtcatcttccacgtcttccacggggtcgactccaacgctatcttcctgctgaagatcggcagtgtgaccatgaccttcacagcctctgtgggcagcctgctgctaaccgctgttgaccgctacctatgtctgtgttacccgcctacctacaaagctctagtcacccgtgggagggcactggtggccctctgtgtcatgtgggtcctctcagcattgatttcttacctgccgctcatggggtggacttgttgccctagtccctgctctgagcttttcccactgatccctaacgactacctactgggctggcttctattcattgccatcctcttttccggcatcatctatacctatgggtatgtcctctggaaagcccaccggcatgtagccaccttggctgagcaccaggacaggcaggtgcctgggatagctcggatgcggctagacgtgaggttggccaagactctgggcctggtgctggctgtgctgctcatatgctggttccctgcactggctctcatgggccacagcctggtcaccacgctgagtgaccaggtcaaggaggccttcgccttctgttccatgctgtgccttgttaactctatggtcaatcctatcatttacgccctgcggagtggagagattcgctctgctgcccagcactgcctgataggctggaagaagtatctacagggcctcggacctgaggggaaagaagaaggcccaaggtcctcggttacagaaacagaggctgatgtgaaaaccacctaggagccaggatccagaactccaggctgctccaactgctgacaccacctgtctttctactggaaacagcccgagtcagaagtccgttcagttcactccctcgaagagagaggggttccagacccggattctttctgaagccagttctagggtaatggaaacagatccccctttttgctaaggaatgctggttggctggaaggtggcctggtcatgcctaccttttccagtctgtggagaggggcctgtaagaatggcaggctctgttcatatcaaatcaggaaagccttctgactccaaagacctagaggccagaggggcctccagagatgatactaaaggattcaggagatctgtgaagacaagggacctgttctcctggaatctagagtaccccagccgtggggccactgccctcaacttcatagatgtccatgtcttccatagtgtggattctagactgtcctgctgaagatagagagaccagctgcttctggttcctgcttcatcctctgtggctgtagagctatgtgaggctccgccttcaggccacccttgcctcttgagggtcaagaattatgatgccctaaggaccaaggatgttcgcttacatccttcagacagcgtcaggagctgtcagctcagggtatcctgttgttgggaaagggccctcctgacatcctgataagccttgaaagccattatgaccttaggtccttaggggcgcagaggaagctgggttcactggaggtacaaagtcttcagagaactctattccttgtgacattttgctgtgtctcacacagcactatcccagtcttgcctagcttcagtacaaagcaagatattcacacagattctttgggtcctaggctgttcccagtgatgcttgactcagccccactggcctcttccacactctggtcctgaaggataagcagaaggagttgggagggaagacttcctgctgcaaaccaggcatcctaggtccacagccccacgctgtgtctctgggtgcctgcctttgcccttcagtaaaggttgcagtcccaacagatggaggttcaaggcgctgctggtggtaggaggggtaggtggcactggggaccacagacacagtgaaaggaaaactcttaaacatttaatacttttgcttttagaagatccagcccgcagacaggacttccccattgcccaaaggaactaacagggtggtgtccagtgcaaagaaaaatcagcctccctaataaagcaaggcggtccactcggctctacagcctctcctaagcttctgcaaggtgacagtttgttttctctgtgaaggtcaacggcgtctcattttattcttcccaagacaagttctgtgcatcaaaagctgctgcaaattctaatcgctgtttgggaggatcaggggaagaagtcgattcgcccacgcttagtgatttagactgtatttcaacatcaacttgggggaggaagagacagaaaagacacggtgtttccttattactcctcaaaggaggaagtgcttggttctgtcaacataagccgatctctccaaggtgcctgacagaggaggagggaatacagtttccacagctgtgaattcctgcaccagctttggtccacacttatgtggtcttgggcaacccccgccctttaccttgctttggtttccttctcggtaaattgggaatggtggggaaaacaatgctctccagggccattaaaacctctcattgctctaacatgctgtggttatctctgcaaccatggagacctttgtgccatatggaccatgtgacttctggctcccatacttcctgaagttatgggcacacaccatataccattgggcgtgtgctgactgtagaggaattgggtgactggccaaatgagttttagagattttcccagggcaagagggttctcttggctctcaatttttctggtccctcatgcctcagtggtcccctgtgtgtgggtcaggcatgcttgtttagcggtgccagactgaagctccggccttccggtgtaccaagcaagtgttgtactcctgagtcaggttttcttcagttagatgctaactaagctctctgagagaccctcaaagtttttgaggtgtagctcagtcagtagagtgctgcatctgcaagagcaaatctctgggttcaaaggtcagtactacctaaaaccaggaatggcagtgccatcccctacctgtaatcccagcactcctgaggtacaagcaggaagatcaggaatgcaaagttactgtagctgtaagttcgaagccagcctgagctagttgagacccccttacctcaaaataaatttaagttacaattctaaattaaattaaaatgtctagggctggagagatggcttagtggttaagagcacagactgcttttccagaggtcctgagctcaattcccagcaaccacatggtggctcacaaccatctgtaatggaatctgatgccctcttctggtatgtttgaagagagcgatggtgtactcatatacataaaataagtaaataaatctttttttaaaaaaatgtttaagttcctcggagttcttgttaagttcaacggacaaaagatagactaaaataaccacgtctgcccttaatctttcagcagccatttctctccctccgcataaagctccttctaaccttgttatttctcaatctcttcggcaactctccaatctgctaaactccacctgctggctggaggtatagcacagagaacccgcggctcctaaatagtcactaaataaaacgacctggcttcagccttcccctgaagattggtgcaacaacgtggacttctcccagttttccccacaccttgggtctttctcacttgcggggaatccggcaattaaatccttaggcgagtctacggaatttaaattcaatagagcagaaccagcaacgccgccttaagtctttctcccttccaatgccagagggcgctccagagccgcaagcctgaccccaccccctctccttccaagccaatcgttactctgagaggcggggctactcgccggcgcttgcgtgttaagaggggggcggtgcgggcccggaagcaaggatgtaggagctgaacttgagtggtgggctgtggactctgggatgctgctgctgctgctgctgctgctagtggctgcggcccaggcagtggccctggctccgcgccgcttcactccggactggcagagcttggactcgcggccactgccgagctggttcgatgaggccaagttcggggtgttcgtgcactggggggtgttctcggtgcccgcctggggcagtgaatggttctggtggcactggcagggcgatcggatgccggcctaccagcgcttcatgacagaaaactacccgcccggcttcagctacgccgacttcgcaccgcagttcacagcgcgcttcttccacccggatcagtgggccgaactctttcaggctgccggggccaagtgagtgcgggacgggcgcgaggcgggagcaggcaggccatagccggcgctgcctgacctcggaaggtccaggaccctacgttctgcatctcggaggaaggacgctaaagacgagaatccagctgaggatcagttaaaaataaataaataaaataaaataaaataaaataaaattaaggcgggaaagcactgggtggtacacctgtgcggagagagactagaatcaggctacatcggtgtctcgtttgaaaggtccagaacacagcccagattcccgtcggtggccctgagttgtagacctgaccagtccccttaggctacgggtagcgtccgtccgtggaagcttataaaaaagcgccgcctgacttccttgtagccctgtgcctctaaaggaagaaggaaggatggaagtttggggttgctctttgttggggtctccctcacttctcgcttgcttataatagaactcagaggaggaagggggttgtttgggcaaagccctgcagaggaagtgcgttttgagagccctctaagccagagaaaatattggctgactttggacgcgggatttggccactgtgagggcagactcccgctcctggcttagtgtagtcctccgctctcttcattgattttctgccaaactccgactttttattccctcgggacgttaggttttctcccccgaagggaaaggctgtgtatagctggcgcttagtatattcgccaagtaaaaggcctgagggaacagaaatctgtcttcttgccatcttgagagccgtaatttacaaagttgaactccagcctttttccagacttcctgtttaatggacgaggtaactagcccagagagaggaaggagaggaaggagcctggtgtcctagactgcaggtctatgatctggaagtgaaagctccagaaagctcatgggacaggtgtgcccagactctgcaagccatacccagagggcgtggttatttgcttgttgagtgggaagggattttatatttcagaaggactttttgaaaggggaaagagatgtattgcaggaaggactgatgtatgagcggaagtctgccctgagggggcccttacaccagctagtggtaaaatctcatgtaacatgctatcttttcctataaaagtaagtgatatattgaatggactgattatctcaacacattttttttttcagtcctagatatttgagcctttgtcaccttaaatgacaggcagtttcacaatcttggttaagaaaacgagcagatgggggctggagaaatggctcagcggttaagagcactgactgttcttccaaaggtcctgagttcaattcccagcaaccacatggtggctcacaacaaccatctgtaatgggatttgatgccctctttctggtgtgtctgaagacagctatgatgtactcatacatataagtaatataaataaacaaatattaaaaaaaaaaaacgagcaggtgcttgtgtctgccttttgctcttgccaatagattggggcacagggttgacacaggttcatcacttatttccagaagggttgagcctgagagctaagtagcacagcatttcttctgccagcctcccctctgcctctaaacctccagtgcctccatccattcttgagtcatacctgcacagggataattatcactatagaaacattatcacggttgtcatggtgactcatcccaagggcctatccttttcatcaagacctgcccgacttgttaaaattctcagacatgcctggcaaggccatggttgtggacatcgcccaactcctttgttctcgtttggttttgatgcctgcaggtacgtcgtcctgaccacaaagcatcatgaaggcttcacaaactggccaagccctgtgtcttggaactggaactcgaaggacgtggggccccaccgtgatttggtcggtgagttgggagcagctgtgcggaagaggtgggtgtctgtggacagccagcgactccaccaacctccctatctagccctccagagagccagtctgggtccccttgtttgtctgctagggtcatttagccagagagcagatggactcccagactttgaatttgagacttggtggttttcacaggaccaaaggtgatccaaagaaagttcacagtgggtggaggacacctgtcatagaccatggtggtcaactttgcaacctgcaaaggacttccatgagagaacttgcaatacagagccttctctaatatgtgacagaagccagggactgggtcccacctttctcctccatagccaccagcatccaacaccaagctgttcagacctgagggcaagctctgatgatggccgatcaaaaaccaaagagggcaacacacagctgattctcctcagcacccctcagtcttgtcacttaacgggaagtaacaagccagactgctgctaattacttgggaggcaaagtaacccaagccagacagagtagccagacatgatggcacttgggtggcaatggcaggagggtcaggagttcaagaatgaccttaggtatgtagtgagtttgagtctagcctgggctaaacaagactacatctcaaaaagccaaatactactactaataatagaaattaacttctccattaagaggtggggtggctttgggttttggtgctaagggtcaaacacgggacctcacgtatattaggcggctgctcctacaccgaatgcattaggcacttctgtgttagtgaccaccatacctgttaaaaccagcttcaggcagggaaggttgcttttcagaccagcgtggtggagcatctgcatacatggcatgcacacgctgtggtcgaggccattcattcacgtatcaaatgactcgggagcagcaggaactagaggatgtccttcaggtgtcccacttctgccagcatgtccccccctcggaacggttccatggacccccaaaacaacactatcaggaaaggaacaagccttcagaacaggagcctggggggagatagtgcagattcaagcctcagcaccaagccctatcccctgccaccagttcgtatccgggttttaaactctcctagatatgtttgcctttaagaaagaagattgcactgggcatggtggcgcatgcctctaatcccagcacttgggaggcagaggcaggcggattttctgagttcgatcgaggccagcctggtctacagagtgagttccaggacagccagggctatacagagaaaccctgtctcgaaaaaccaaaaaaaaaaaaaaaaagaaggaagattgctttctgctatgactctgagatgtagactgactgcctgtttctataaattgagtttgattgaaacacagctatgcttgtgttctacactgcccaggactttaaaaatgcatttgctgactcctgttacctgctctggtccgtgccccatgctgcacttggccactaaccctgtgataagtgttcatgtgatcttaagtgtggactacacttggactttggaagtagctgttttctttcagtttagtttggtcttatgagacagaaccttgctctagatccctgaagagcttgaaacttgctgtgcagaccaatctaccttctaacttgatgcaatcctcctgcctctgccttccaggtgcttggcttccgggcctggcaccatgcccagccttagcaggctgcattggtaccttctctatcagtggttagtccacaagttacatactgaaaccaaacacacaaacacacacacacacacacacacacacacttcagttctttcttgctgtgttatttttctttattgcccgcactctaatgtttgcatagcaccatatcttaaccataagaattaaacatttttatgaggcacagtgtgacatttgtacagtgtatgatgaacaaatcaggacagttagcacttctagatccttaatgtgtcttttctttgggttagaggccttcagtctcctttctcctggttctttaaagaagtatttaatacagatggggatgtagcacagatgactcccaggaccataaaaaaataaagtaagaagatggtagtggtacatgcctttaatcccagcactcggaagacagagccgtgtggatgtttggggtcagcgtggtctgcatagctagtcccaggctggccagggctacatattgagaccctgtctcaaaaatgtgtgtgtgaaataaattattaaaattaaataaaagatctcagatagcttaggctggcatcaagcccatttggtagccaaggatggcctttaactcctgacccctccctctccccctccaaagtgctgactccagccccagcctgatttttcttaaagcaaatggttggccctctgcctaatgccagctgctgctgtgtttttctgttcaaggaacatacgctacggcctctaccactcgctcttggaatggttccatccactctacctacttgataagaaaaatggcttcaaaactcagcatttcgtcagggcaaaaacaatgccagagctgtatgaccttgttaacaggtaagaaacaggggcacctggggccccaccactgtagagtgctgttccagggctccggcacaaggcagctctttgaaaaccaagtacaagacatcaaaatgataaaagtggtgtttatatcaatgcaaagcttgcttccctccttcccttcccaccgctcagatcttctgggctgtgctcacttactgatgccacagtcacggagacctggctggtgaagtgtcaaagctagtgcttcagggcctcttcccttgccattgggcccagtcaagacctcggcgaggtcaccatttgaaaatcgactgcttgcaatgcggagttgttgctaacggtagctttcgctcccccacctaagctctgggaacagactgcactaccgctcctcacccagagtcccttgaataaaaatcacagacacacatgtcgctcaatttcaacttgcctttttggctcaattgctgggcactacttatctcccgcctggagaagcgtgcccttatcaatactcttaactcggcacctctccatctgccctcaacttagttgctcagttacatcttgtcgctggtcaactgcctgcctgtgagagtggcccacaggcctgagatcccacatggctggtcaccttttctcccactgaagcatggtgaacactctctctctatctctctctatctctctctctctctcaccctccctccctccttccctcccttcctctctctctcttcccctccctctctctcctggtgtctgtctcattcttccaggacctgcctgttccttccgtccagcaattggcccttggcttctttactgatagaccaataaccaattggggaacaagaccttagcataaaaaccacccctccagctaacctgcccaatgttttcttttatatcgattgactgattggttggaggatgagtggcgttggcgtgccacaactcacgtgttcaagtcagaggacaattttgggaagttagttttctcatctactgtgtggaccccaaggatcagcaagccctttcacccactgcccctcttgctaatccgttcaatgctttccctagttatatgtgggagccacccctgcatgggggacccttggagcccaaggggggcttcttcgcccctgtagcccgcggccacgagaacagggttcctgaaggggaggcagggcctgaatggagagatggcaagagaccaagacaaagatactgatcaaggcccaaagtttacttaagagtcttgagtttataaaggggggaaggcccatcccccaccacgccaggttcttgatgctttgtcaccaagttgttgcttattcaggaatgtctcaggtaagaacagttacatgctgtctcaaaaacaaacaacaagctgggctgtggtggtgcacgcctttaatcccagcacttgggaggcagaggcaggtgaatttctgagttcgaggccagcctggtctacaaagtatgtcccaggacagccagggctacacagagaaaccctgtcttgaaaaaccgaaaaaacaaaaacaaaaaccttctgctgggtgtggtgatgcagacatagaatcccagctactaaggaggctgaggcaggaggacagcttgtccccaggaggtgggggacagcctacgcagcatggtgaaaccatgacctacacataggaaaggtactcattaggagccgacgccacagaacttggtattgaaannnnnnnnnnnnnnnnnnnnagcagtgtcttggagataagctcaaaggtggcagaacaattggcctatctaggtcagaagactccaccctgagtggtctccttaacagtggcagaacaggtctgagccagcctgctcaaggctgggggaggctacgcgccctaactctcactttatatattttatttttgttattatgtttgaatttctctctttctttggtttttcaagataaggtttctctgtgtatctctgactatcttgaaaatcactatgtagcccaaactggcttcaaactcagagctccacctgcctttttggtttttcgagacagggtttctctgtgtggccctggctgtcctggaactcactttgtagaccaggctggcctggaactcagaaatccgcctgcctctgcctcccgagtgctgggattaaaggcgtgtgcttttctttttatggtaagatctcactttgtagtccttgttggtgctcccgcttcagcctctgaaatgtgaggatttcaggctgagcctccattctcagctggctggctggctggttggttagtttgtttttgagacaggtcttcctttgtaacctaggatggcctctaatttcaggcatcccctgagtgatgggattacagccatgagccactgtcccaaacttctagccagtccccttgcatctggttttagtcagatgactgtcaggacagttgtaaaacacctgtagagggcaggacaagtgcaggtgtctggagttctgaaatcaagtttagtttttgggttgttgttgtttttcttctttcctctctcctccctctatagtcttatctaaccttggccgacctcacatctatagcaatcctgatggcttgggattttctgcgtgctggaattataggcctgtgccagtgcccctagcttttttcttttgtaaagtttgtggcttagagtaacttgcttagtctctcccttgctttcttctttttttaataatatttatttacttattaattatatatgtaagtagctgtcttcagacacaccagaagagggcgtcagatcccattacagatggttgtgagccaccatgtggttgctgggatttgaactcaggacctttggaagagcagtctttaagtgctcttacccactgagccatcttgccagcccccttgctttcttctttatccctgaactggggttagaaatcacaggagctgacaaggtgatgggcatagagccccagggtggcctctgatttgcaataactcaggttcaggttcccaaatgctaccacacctagctctttttttttattttcttggtccctgacaagacatgggtctttcaacttgctgagcagtgctctgccactgagccacagtcacgtttgattacgatgtgtccgtgagcacgtatgccttatgagcacgcatgtggaggaggtcagaggtcagcctgcggaagttggttctctccttccaggaggattctgggggtcaggcttggtcatcaggcttggcagcagaagctttgccagctcaaggcaagcctcctggcctgcccaagcaccaacctctttgtcaaagcttaattattatttatgtgttgttcgtgtacaccatgggcagcaggtgcctgaggaaaccaaagagcatcaaattccctgaaataagcagttgggagccgccatgacgttgggaagcaaacccaattctctgcgagcagtaagcaggctcgctcaccccctgaggtgactggagccctgggagcagcccccctaattagttactgattatatgtagttccttttctaaaggggcagcgaaggagattaggggaaatgtgccttagtaccgcagtttattattattattactattgctattattactatgattattaccctttagtttatttgggacgtgtgtgcatgcatgtgccatggtgtgcatgcagaggtcagaagaccacttgcagagtcagtgtgcccgggactgaactcaggttgtgagacttggcaagcaggcgcctttacacactgagccagttcaccagcccctgcagctctccttttaattaaattaaattgttactttttggttttggtttttggtttttggttttggtttgttttggtttgtttttctcgagacagggtatcactatgtagccctggctgtcctggaactcactctgtagaccaggctggcctcgaactcagaaattcccctgcctctgcttcccgagtgctgggattaaaggcgtgcgccaccacacccggccctaaaatcgttactttagctgtttgagtgttttgcctgcatgtttgtctatgctctccatgtacgcctggtgccaacagaggccagaaagtggcatcagatccccaggggaactgaaggatgggtgattgtgaacctccattgtgggtgtgggaaatcagacgagagtctcaacttctagacgagcagcccgttctcttccagagcctgagccatccactgctgaccccgcactacagagctacctctccacaccctgtctctgaggctcttttagactgtggttgtgttagcaaaaaaaaaaaaaaaaaaaaagatttcttatctctttagtttctgcattgtgatttttatggtcctttccaatcaagagacttccttctgacaagctaggagtggaactcatgacctcacatgtgataggcaagtgctctccctcagagccagactcccagttctaatttgtaaatatttattgtaatacctgtccgtaa

SEQ ID NO: 929 - DNA, 3715 bp, Mus musculus
agatctggatacagaatagccaggacaaggctccacaagaccctggggcccagcggctgacaaatgacacccagtcttctgggacagctccagtagaagaagccaaagcccatccatggagggatgccgggagacagaagtgaccaacggctccaacggtggcttggagttcaaccccatgaaggagtacatgatcctgagcagtggccagcagatcgccgtggcggtgctgtgcaccctgatggggctgctgagcgccctggagaacatggccgtgctctatattatcctgtcctcccggcggctccgcagaaagccctcgtacctgttcatcagcagcttggctggagctgacttcctggccagcgtgatcttcgcctgcaactttgtcatcttccacgtcttccacggggtcgactccaacgctatcttcctgctgaagatcggcagtgtgaccatgaccttcacagcctctgtgggcagcctgctgctaaccgctgttgaccgctacctatgtctgtgttacccgcctacctacaaagctctagtcacccgtgggagggcactggtggccctctgtgtcatgtgggtcctctcagcattgatttcttacctgccgctcatggggtggacttgttgccctagtccctgctctgagcttttcccactgatccctaacgactacctactgggctggcttctattcattgccatcctcttttccggcatcatctatacctatgggtatgtcctctggaaagcccaccggcatgtagccaccttggctgagcaccaggacaggcaggtgcctgggatagctcggatgcggctagacgtgaggttggccaagactctgggcctggtgctggctgtgctgctcatatgctggttccctgcactggctctcatgggccacagcctggtcaccacgctgagtgaccaggtcaaggaggccttcgccttctgttccatgctgtgccttgttaactctatggtcaatcctatcatttacgccctgcggagtggagagattcgctctgctgcccagcactgcctgataggctggaagaagtatctacagggcctcggacctgaggggaaagaagaaggcccaaggtcctcggttacagaaacagaggctgatgtgaaaaccacctaggagccaggatccagaactccaggctgctccaactgctgacaccacctgtctttctactggaaacagcccgagtcagaagtccgttcagttcactccctcgaagagagaggggttccagacccggattctttctgaagccagttctagggtaatggaaacagatccccctttttgctaaggaatgctggttggctggaaggtggcctggtcatgcctaccttttccagtctgtggagaggggcctgtaagaatggcaggctctgttcatatcaaatcaggaaagccttctgactccaaagacctagaggccagaggggcctccagagatgatactaaaggattcaggagatctgtgaagacaagggacctgttctcctggaatctagagtaccccagccgtggggccactgccctcaacttcatagatgtccatgtcttccatagtgtggattctagactgtcctgctgaagatagagagaccagctgcttctggttcctgcttcatcctctgtggctgtagagctatgtgaggctccgccttcaggccacccttgcctcttgagggtcaagaattatgatgccctaaggaccaaggatgttcgcttacatccttcagacagcgtcaggagctgtcagctcagggtatcctgttgttgggaaagggccctcctgacatcctgataagccttgaaagccattatgaccttaggtccttaggggcgcagaggaagctgggttcactggaggtacaaagtcttcagagaactctattccttgtgacattttgctgtgtctcacacagcactatcccagtcttgcctagcttcagtacaaagcaagatattcacacagattctttgggtcctaggctgttcccagtgatgcttgactcagccccactggcctcttccacactctggtcctgaaggataagcagaaggagttgggagggaagacttcctgctgcaaaccaggcatcctaggtccacagccccacgctgtgtctctgggtgcctgcctttgcccttcagtaaaggttgcagtcccaacagatggaggttcaaggcgctgctggtggtaggaggggtaggtggcactggggaccacagacacagtgaaaggaaaactcttaaacatttaatacttttgcttttagaagatccagcccgcagacaggacttccccattgcccaaaggaactaacagggtggtgtccagtgcaaagaaaaatcagcctccctaataaagcaaggcggtccactcggctctacagcctctcctaagcttctgcaaggtgacagtttgttttctctgtgaaggtcaacggcgtctcattttattcttcccaagacaagttctgtgcatcaaaagctgctgcaaattctaatcgctgtttgggaggatcaggggaagaagtcgattcgcccacgcttagtgatttagactgtatttcaacatcaacttgggggaggaagagacagaaaagacacggtgtttccttattactcctcaaaggaggaagtgcttggttctgtcaacataagccgatctctccaaggtgcctgacagaggaggagggaatacagtttccacagctgtgaattcctgcaccagctttggtccacacttatgtggtcttgggcaacccccgccctttaccttgctttggtttccttctcggtaaattgggaatggtggggaaaacaatgctctccagggccattaaaacctctcattgctctaacatgctgtggttatctctgcaaccatggagacctttgtgccatatggaccatgtgacttctggctcccatacttcctgaagttatgggcacacaccatataccattgggcgtgtgctgactgtagaggaattgggtgactggccaaatgagttttagagattttcccagggcaagagggttctcttggctctcaatttttctggtccctcatgcctcagtggtcccctgtgtgtgggtcaggcatgcttgtttagcggtgccagactgaagctccggccttccggtgtaccaagcaagtgttgtactcctgagtcaggttttcttcagttagatgctaactaagctctctgagagaccctcaaagtttttgaggtgtagctcagtcagtagagtgctgcatctgcaagagcaaatctctgggttcaaaggtcagtactacctaaaaccaggaatggcagtgccatcccctacctgtaatcccagcactcctgaggtacaagcaggaagatcaggaatgcaaagttactgtagctgtaagttcgaagccagcctgagctagttgagacccccttacctcaaaataaatttaagttacaattctaaattaaattaaaatgtctagggctggagagatggcttagtggttaagagcacagactgcttttccagaggtcctgagctcaattcccagcaaccacatggtggctcacaaccatctgtaatggaatctgatgccctcttctggtatgtttgaagagagcgatggtgtactcatatacataaaataagtaaataaatctttttttaaaa

SEQ ID NO: 930 - protein, 359 aa, Mus musculus
HPVFWDSSSRRSQSPSMEGCRETEVTNGSNGGLEFNPMKEYMILSSGQQIAVAVLCTLMGLLSALENMAVLYIILSSRRLRRKPSYLFISSLAGADFLASVIFACNFVIFHVFHGVDSNAIFLLKIGSVTMTFTASVGSLLLTAVDRYLCLCYPPTYKALVTRGRALVCVMWVLSALISYLPLMGWTCCPSPCSELFPLIPNDYLLGWLLFIAILFSGIIYTYGYVLWKAHRHVATLAEHQDRQVPGIARMRLDVRLAKTLGLVLAVLLICWFPALMGHSLVTTLSDQVKEAFAFCSMLCLVNSMVNPIIYALRSGEIRSAAQHCLIGWKKYLQGLGPEGKEEGPRSSVTETEADVKTT

SEQ ID NO: 931 - DNA, 21906 bp, Homo sapiens
  misc_feature (1)...(21906): n = A,T,C or G
nnnnnnnnnnnnnnnnnnnnnnnnnnnnnnnnnnnnnnnnnnnnnnnnnnnnnnnnnnnnnnnnnnnnnnnnnnnnnnnnnnnnnnnnnnnnnnnnnnnnnnnnnnnnnnnnnnnnnnnnnnnnnnnnnnnnnnnnnnnnnnnnnnnnnnnnnnnnnnnnnnnnnnnnnnnnnnnnnnnnnnnnnnnnnnnnnnnnnnnnnnnnnnnnnnnnnnnnnnnnnnnnnnnnnnnnnnnnnnnnnnnnnnnnnnnnnnnnnnnnnnnnnnnnnnnnnnnnnnnnnnnnnnnnnnnnnnnnnnnnnnnnnnnnnnnnnnnnnnnnnnnnnnnnnnnnnnnnnnnnnnnnnnnnnnnnnnnnnnnnnnnnnnnnnnnnnnnnnnnnnnnnnnnnnnnnnnnnnnnnnnnnnnnnnnnnnnnnnnnnnnnnnnnnnnnnnnnnnnnnnnnnnnnnnnnnnnnnnnnnnnnnnnnnnnnnnnnnnnnnnnnnnnnnnnnnnnnnnnnnnnnnnnnnnnnnnnnnnnnnnnnnnnnnnnnnnnnnnnnnnnnnnnnnnnnnnnnnnnnnnnnnnnnnnnnnnnnnnnnnnnnnnnnnnnnnnnnnnnnnnnnnnnnnnnnnnnnnnnnnnnnnnnnnnnnnnnnnnnnnnnnnnnnnnnnnnnnnnnnnnnnnnnnnnnnnnnnnnnnnnnnnnnnnnnnnnnnnnnnnnnnnnnnnnnnnnnnnnnnnnnnnnnnnnnnnnnnnnnnnnnnnnnnnnnnnnnnnnnnnnnnnnnnnnnnnnnnnnnnnnnnnnnnnnnnnnnnnnnnnnnnnnnnnnnnnnnnnnnnnnnnnnnnnnnnnnnnnnnnnnnnnnnnnnnnnnnnnnnnnnnnnnnnnnnnnnnnnnnnnnnnnnnnnnnnnnnnnnnnnnnnnnnnnnnnnnnnnnnnnnnnnnnnnnnnnnnnnnnnnnnnnnnnnnnnnnnnnnnnnnnnnnnnnnnnnnnnnnnnnnnnnnnnnnnnnnnnnnnnnnnnnnnnnnnnnnnnnnnnnnnnnnnnnnnnnnnnnnnnnnnnnnnnnnnnnnnnnnnnnnnnnnnnnnnnnnnnnnnnnnnnnnnnnnnnnnnnnnnnnnnnnnnnnnnnnnnnnnnnnnnnnnnnnnnnnnnnnnnnnnnnnnnnnnnnnnnnnnnnnnnnnnnnnnnnnnnnnnnnnnnnnnnnnnnnnnnnnnnnnnnnnnnnnnnnnnnnnnnnnnnnnnnnnnnnnnnnnnnnnnnnnnnnnnnnnnnnnnnnnnnnnnnnnnnnnnnnnnnnnnnnnnnnnnnnnnnnnnnnnnnnnnnnnnnnnnnnnnnnnnnnnnnnnnnnnnnnnnnnnnnnnnnnnnnnnnnnnnnnnnnnnnnnnnnnnnnnnnnnnnnnnnnnnnnnnnnnnnnnnnnnnnnnnnnnnnnnnnnnnnnnnnnnnnnnnnnnnnnnnnnnnnnnnnnnnnnnnnnnnnnnnnnnnnnnnnnnnnnnnnnnnnnnnnnnnnnnnnnnnnnnnnnnnnnnnnnnnnnnnagtgagactctgtctcaaaaaaaacaaaaacataaccaaaaaaagacataaagatgtctatagagaggcacaggatttttccttttgcctcaggcaaggctcggttttcaactccagtctggggaaaatccctccagtattctctaaaatgttatattgctgcctgcaagttctcttcacttttatctactcataaatcctctaaactctccttaaggttaggctttacaagggattggcccaacactgtggggggtttttttgtttttgtttttttgttgtttgtttgttttttggagatggagtcttgctctgtcacccagactggagtgcagtggtgcaatctcagctcactgcaacctccgcctcccgggttcaagcgattctcctgcctcagcctcccgagtaggtgggactacaggcgcacaccaccatgcctggctaattttttgtattttagtagagacagggtttcactgtgttgccaaggctggtcttgagctcctgagctcaggcaattcgcctgtttcggcctcccaaagtactaggattacaagcatgagctaccacgcccggcctaacactgtttttaagattcatcattgttggcacgttttcaccactttgtggtattccttcatatggctgtattacaacttatttatccattttccagttgatggacatttagaattgttcttctatttcaaaaatgccaaagagaacattcttgtacatgcctccctggacgcacctgcaggagttcctccagaacgtattcccgggactgcaattgatgtatcgtcaacttcaccagattttgccaagctgctcttcaaagtgtctgtgtcaacttacacccccatcgcaatgagagttcttttggctccacgccttctccagcactcagtattgtcagccttacttttttaccgatctgatgggagtgaaacacatttctctgtctactattgaggttaagcatcttttcaaaggattattgaccatttctctctcatgccctgtatttttcttcattgtggttgctctcctttttcctttagtaatcttgcctgtggtcatctattttataatcttttcaaacagccagctttgactttgtcagttctttctcttccctatagttttgccatgtcattaatttctgctcttattatttctgtcttctgctttctttgaatgtatgccatggcccttcttctaatttcatgggttgcatgatgagctcatgaggcttttttatcttgtagtatgagcgtttattattaatttatttattgagaacagagtctcgctctgttgtccaggctggagtgcagtggcacaatcttggttcactgaaacctccgcctcccaggttcaagcgattctcctgcctctgcctcccaagtagctgggattataggcaccagccatcatgctggctaattttttttttttttttttttttgtatttttagtagaggcagggtttcaccatattggctaggctagtctgaaactcctgacctcaggtgatccacccgccttggcctcccaaagtgctgggattacaggcgtaagccaccgcacctgatagtatcagcatttagagctgtaaatttccctttgcatacgactcagatgaatctcacacattttaatgtctcacaatttcatagtcattcaatgccaagtatcttctaatcgcctttatgaatttttgaaccaggaattattcaaaagtgtgtctttttttcttttttcacacatcagactggtaacgtgacaatgtcatcataggtttgaggaacatctcacacttgagcatgaaaaccagtcatcacgcttatgaactacgaagggatcccgaagtgtgtttttaaagatccatacctgaggccaggcacggtagctcatgcctataatcccagcactttggaaggccaaggtgggcagataacctgaggtcaagagttcgagaccagcctggccagtatggtgaaaccccatctctactaaaaatacaaaaaattagctggtcgtggtggcaggcacctgtaatcccagctacttgggaggctgaggcaggagaatcgcttgaacctgggaggtggaggttgcagtgagccaagaccgctgccactgcactcccagcctgggcacaacagtgagactccatctcaaggaaaagatccatacctatgaactttgttagtaatttttttttttaaagacaaaatttcgctctcgttgcccaggctggagtgcaatggcacgatcttggctcaccgcaacctccgccttcccaagttcaagcgattctcctgcctcagcctcccgactagctggaatcacaggcaggcaccaccatgcccggctaattttttgtatttttagtagagacgaggtttcttcacgttggtcaggctgatctcgaactccctacctcaggtgatccgcccgcctcggcctccaaagggctgggattacaggtgtgagccaccatgcccggcctagcaattttttttttctttttttgagacagggtttcactctgtcgcccaggctggagtgtagtgatgctcattgcagcctccgcctcctaggttcaaacgattctcctgcctcaaccacctcagtagctgggattacaggtgtgcaccaccaggcctggttaatttttgtatttttagtagagatggggtttattagagacaggctggtctcaaactcctggcctcatgtgatctgcccgcctcggcctctcaaagtgttgggattataggcatgagccaccatgcccaaccagtaattttttaaaattattattattatatatattttttgagacggagtctcactctgtcacccaggctggagtgcaatggcgtgattttggnnnnnnnnnnnnnnnnnnnnnnnnnnnnnnnnnnnnnnnnnnnnnnnnnnnnnnnnnnnnnnnnnnnnnnnnnnnnnnnnnnnnnnnnnnnnnnnnnnnnnnnnnnnnnnnnnnnnnnnnnnnnnnnnnnnnnnnnnnnnnnnnnnnnnnnnnnnnnnnnnnnnnnnnnnnnnnnnnnnnnnnnnnnnnnnnnnnnnnnnnnnnnnnnnnnnnnnnnnnnnnnnnnnnnnnnnnnnnnnnnnnnnnnnnnnnnnnnnnnnnnnnnnnnnnnnnnnnnnnnnnnnnnnnnnnnnnnnnnnnnnnnnnnnnnnnnnnnnnnnnnnnnnnnnnnnnnnnnnnnnnnnnnnnnnnnnnnnnnnnnnnnnnnnnnnnnnnnnnnnnnnnnnnnnnnnnnnnnnnnnnnnnnnnnnnnnnnnnnnnnnnnnnnnnnnnnnnnnnnnnnnnnnnnnnnnnnnnnnnnnnnnnnnnnnnnnnnnnnnnnnnnnnnnnnnnnnnnnnnnnnnnnnnnnnnnnnnnnnnnnnnnnnnnnnnnnnnnnnnnnnnnnnnnnnnnnnnnnnnnnnnnnnnnnnagtgaaactccatctcaaaaaaataaaaactaaaaataatacattttatatattagaaggtgatagtggtatggaaaaaataaagacgaggtcagtgtaaagagaagcaaaagagctggaggttgggctaggtgcagtggctcatgcctgtaatcccagcactttgggaggctaaggcgggcagatcacgaggtcagatcaagaccagcctgactaacacggtgaaaccccgtctctactaaaaatatgaaaacttagccgggcatggtagtatgcgcctgtagtcccagctactcgggaggctgaggcaagagaaaggcttcaacctgggaggcagaggttgcagtgagccgagattgtgccactgcactccagcctaggtgacagagtgagactccgtctcaaaaaaaaaaaaaaaaaaagagttggaagttgggatgagttagggtattacatggggtagtcagggtaggtgtcattgaaaaagtaagatctgggcaaagacttaaacaaggtgagagcaagccaagtaaatgttgagggaaaggtgatccaggaaaagggaacagccagtgcaaaggacctgtggctgaagagaagactgattaagaagccaatgtggctaaagctgggtcaccaagggaatcatggtagaagggaccataacactaaggactttggcttttacatagtggactagggagctatgcagggtttgggacagagaaatgacaagatcctatatttttaaaggatcaccctgactgctatgttgaaactagattagaaatgggcctgattaaaagcagggggcccagttaggaagctattgcaataaaccagataagagatgatgcctggttttttttttaagcctaaaattaatcaatgtctttacccacttcctagataaagctttaactctattcatctctttcttgtcttgcatttttgtcattcacaattttatttctactttgtttttgtttttgtttgaaacaaggtctcattctgtcacccacactggagtgtggtggcacaatcatagatcactgcacactggactacctgggctgaagtaatcctttgacctcagcctcccaggtaaatgggaatacaggcatatgtcaccacgcctggctaaatttttatgtcttgtagagatgggtttcaccatgttgcttaggctggtcttgaactcctgggctcaagcaatcctcctgccttggactcccaaagtgccaggatttcaggcatgagccactgtgcccagtctccactttggttttgtttgtttgttttgttttgttttttgaaacagagtctcactctgtcacccaggctggagtgcagtggcatgatctcggctcactgcaacctctgcctcccaggttcaagcaattctcctgcctcagtctcctgagtagctgggactacaggtgcacaccaccacgcctggctaatttttgtgtttttagtaaagatgggcataaattactcactattatcattgttgttttataaagccatttgcttttctttactcatatttgtcaacttacttgctcactattctttcttgccgttcttttcttccctttgggttgaatttccttctaaaatgcacattctttagatgttccttcagtgaaagtctgttagtgaacaattttctttgaattttttagacctcattcttgaatgatagtttagctgggtataaaattctagactgacagttttttctttattttttggcttctattgttgctgatcagaaatctgctcttaaaattaattatggttctcttacaggtaatttggcttttcattcttactgccttatatttttctttgtctttggtattctgatatgtatgctatatgatatacatgaacatggaatgtgtttttaaaaattctacttggggctgggtgtggtggctcacgcctataatcccagcactttgggaggccgaggtgggcatatcacctgaggccaggagttcaagcccagcctggccaacatggaaaaccccttttctactaaaaatacaaaaattagctgggcatggtggtgcacacctgtagtctcagctatgtcaggaggctgaagctggagaatcacttgaacctgggaactctgtctcaaaaaaaaaaaaaattctgctttgggttccctgtgatttccaaatctgaatagtcttatttttcatggatcctgaataattcttttttgttgttgaggcagggtctcattctgttgcccaggctgcagtgcaatggcatgatcatggctcactgaagccttggcctccctgggctcaagtgatcctcccacctcagcctcccaagtagctgagacaataggcatgcaccaccatccagctaatttttgtatttttttgtagagatggggttttcccatgttgcccaggctggatggataattctttactactacctctttgactattgcccaccaccagttttctctgtttatcctctctaacactcctctgagatataaacatttttactcaatccttcataactcttaacttctctttcttgttttccatcactttatctctttgttctgcattgtgagaaatttcttcagagctacattcttttttttttttttgagatggagtttcactcttatcgcccaggctgctgtgcagtggtgcgatctcagctcactgcaatctttgcatccggggttcaagcgattctcctgcctcagcctcctgagtagctggcattacaggtgtccaccatcgtgcccggctaatttttgtatttttagtagagacagggtttcatcatgttagccaggctagtcttgaactcctgacctcaggtgatccatcacttcagcctcccaaaatgttgggattacaggcgtgagccactgtgcccagccccagatctactttctttttttttctttttattttttttgagatggagtcttgctctgttgcccaggctggagtgcagtggcgccatctcggctctcggctcactgcaagctccgcctcccgggttcacgccattctcctgcctcagcctcctgagtagctgggactacaggcacctgccaccacgcccagctaattttttgtatttttagtagagacgaggtttcaccgtgttagccaggatggtctcaatctcctgacctcatgatccacccaccttgacctcccaaagtgctgggattacaggcgtgagccaccgtgcctggccaccagatctacgttctagatcaatgcttttcagttgttctgttttgctctttaactcatcccttaaggatctcttttttcaatgattttatttttgacttccagaaattctacttgaatctttttcagatctacccagaaacaatctctcattctgtactcatgtttttaattctttattgtttttatatcagacttttttttaaggtatacccaagaattatatgaagttattgaaagtggaattctactgtctgacgtttctgctgactcttgctcatgtttccttatgcattttgcattgtgaacccaaatttcacgggcctttatatgtggtattcctatacaacctgtttagaaagtgaatcgctccaaataaatgtttagtttgctttctaataatgtctaataataaaccatacaatatataggttcctgagggttttttcttcaatatttgtgacatatactaaaaagttacttcttattgacattcatctttttttttttttttgagacagagtcttgctctgtnnnnnnnnnnnnnnnnnnnnnnnnnnnnnnnnnnnnnnnnnnnnnnnnnnnnnnnnnnnnnnnnnnnnnnnnnnnnnnnnnnnnnnnnnnnnnnnnnnnnnnnnnnnnnnnnnnnnnnnnnnnnnnnnnnnnnnnnnnnnnnnnnnnnnnnnnnnnnnnnnnnnnnnnnnnnnnnnnnnnnnnnnnnnnnnnnnnnnnnnnnnnnnnnnnnnnnnnnnnnnnnnnnnnnnnnnnnnnnnnnnnnnnnnnnnnnnnnnnnnnnnnnnnnnnnnnnnnnnnnnnnnnnnnnnnnnnnnnnnnnnnnnnnnnnnnnnnnnnnnnnnnnnnnnnnnnnnnnnnnnnnnnnnnnnnnnnnnnnnnnnnnnnnnnnnnnnnnnnnnnnnncgcagtggctcatgcctgtaattccagcactttagaggctgaggtgggtggatcacctcagatcaggagttcgagaccagctggccaacatggtgaaacccggtctctactaaaagtacaaaaattagccaggtgtggtgggcacctgtagtcccagctacttgggaggctgaggcaggagaatctcttgtgcctgggaggcagaggttacagtgagccgagatcacaccactgcactccagcctgggcaacagagcaagactttgtctcaaaaataaataaataaataaataaataaataaaaattaaaataaaataaattgtttaatcttctgtactttctcttcccatcacttgatgttaagccaaattcataaatcccatccccaaatagttgttaaaacttcagtactttacttgccgaaattggcaaattaacaaaacaaaatgtaaaacaaacaaaaaaaccctcaaccttatcactctagattccatttcttcttggttttgatttcctcttggttttgaccttttgggatttcccttgcttcaaaaggaagtcttaggattagtcttttggaaaatggaaggccaaaaatctcacaagtcacttctgcttgttgcattcccacgtacctcccctgaggcagccaggacagatctggcttcctgcttggatggagaaagggcaaaatacaggcaaacaaaacagaaactgattttcccacatagaatccatccatacaggtagcagttttggctacagtcagttatcaggtgaggtcattcttgtgcttactgaaaaagattattttcttcttctcattgtactgcagcaaagccttctagacaagctcagtggaatctgaagggcccaccccatggaggaatgctgggtgacagagatagccaatggctccaaggatggcttggattccaaccctatgaaggattacatgatcctgagtggtccccagaagacagctgttgctgtgttgtgcactcttctgggcctgctaagtgccctggagaacgtggctgtgctctatctgatcctgtcctcccaccggctccgccggaagccctcatacctgttcattggcagcttggctggggctgacttcctggccagtgtggtctttgcatgcagctttgtgaatttccatgttttccatggtgtggattccaaggctgtcttcctgctgaagattggcagcgtgactatgaccttcacagcctctgtgggtagcctcctgctgaccgccattgaccgatacctctgcctgcgctatccaccttcctacaaagctctgctcacccgtggaagggcactggtgaccctgggtatcatgtgggtcctctcagcactagtctcctacctgcccctcatgggatggacttgctgtcccaggccctgctctgagcttttcccactgatccccaatgactacctgctgagctggctcctgttcatcgccttcctcttttccggaatcatctacacctatgggcatgttctctggaaggcccatcagcatgtagccagcttgtctggccaccaggacaggcaggtgccaggaatggcccgaatgaggctggatgtgaggttggccaagaccctagggctagtgctggctgtgctcctcatctgttggttcccagtgctggccctcatggcccacagcctggccactacgctcagtgaccaggtcaagaaggcctttgctttctgctccatgctgtgcctcatcaactccatggtcaaccctgtcatctatgctctacggagtggagagatccgctcctctgcccatcactgcctggctcactggaagaagtgtgtgaggggccttgggtcagaggcaaaagaagaagccccgagatcctcagtcaccgagacagaggctgatgggaaaatcactccgtggccagattccagagatctagacctctctgattgctgatgaggcctcttcccaatttaaacaactcaagtcagaaatcagttcactccctggaggagagagaggggtcttggcactctcttcttacttaaaccagtcccaggcacctagacacggacccgtttttgctgatgagtgttgggactgactcctggaagacagcctggccttgcccacctgcacacagtctgttggataggtagggccacgaggagtagccaggtgggcgagacacaaaaggcctgggacagggctcagtacaagtcaggtcaggcttcatgcctgcatcctccagagaccacagggagccaaagcgagcctccaggcccagcaatgagggacttgggagaaatctgagaagaatgggttgttctcttgggaagtcagggtatcagatgggatggacatccaggtcttctctctgcctaattgtcaaggcctccttggctctggagctatgaaaggccccactttcaagtcacccttgccactgaggaccgaggactatgctatgatgaggattaaggtgttgacttgcctctttcagagataaatgacaagccttcagtttggggcatcctgttgtttgggcgaggaccctctctgatattctgataatccccacctgtaacctcaggtccctggaaatacagaggaggctgggatcgcctgagacacaaaaatctttggagaattttcttgaccctctgaagtccttccagcagcagtcctggtggtgctgctggaagcaggcaatgtcctagtctaacctaactcgaagaaaaaaaggaagatattcacaaagattgtataaatctccaaactgttcccctatctgcccccaattcagctcccttgcctcctccacacccctattacatataataagcagagcaagtgggaggaggggaaatgtccttcctatatgccaggtatggggctgacatttcagtctattgaccccagctagaatacagctccatgattttaaagatctcaggggccaggcatggtagctcatgcctgtaatcccagcactttgggaggccaaggcaggtggatcacctgaggtcaggagtttgagaccagcctgaccaatatggttgaaaccctgtctctactaaaaatacaaaaattagcagggcatggtggcaggcacctgtagtcccagctactcgggaggctgagacaggagaattgcttgaaccctggaggcagaggttgcagtgagccgagattgcaccactgcactccagcctgggtgacagagcaagactgtctcaaaaaaataaaataaaatagatcccagggtactcatttttcatatgagggaggctgggttcctcccagaggagcctaaaacagccaacaagagaaattgttggcggcaggaagattgcagaggaattctaatgcaattatttgggacctcaaatggaataaaatgaaagatattggttaaacatgtcttcgtttaatactttcaagacaaaatatccactagctattcacttattcattcatctcataaacatgagccaggctctgtgcagggtcctgagtacccagccataaatgagactgtgcccctgtctcatggggcttacagtctatatcctgcttgcaagacagccaataagtcaataaagaagataattacaggcagtacaacaaaggaaatatgcaggttcatgtcatgtaatagggattaattgagttaactcaataaacggtaggatagacctaccatgtgccggctcacttttattgagcctttactatgtgccaggcagggggctaagtgtttttaaatgccttatttcacttcatgtttcccaacaacctgataagaaggtcttagttatcttcattttacagatgtggcaacctcaaagatgcaaagtcacttgtctaaggtcaccctgctaagtaccagagctgaggtctccaacctagttctgtttgacttcaaagcctgccctcttagccactaaccttttggcctagttcagtcaaattctgcttgattattgctcattagggataatattagctatctgtagcatcagattgctgcaaagttaactcatcgtagattctcaatatactccattttattaaatggccccgtattaatctcctgtaataaatttcacaaatccagtggcttatcaacagaaatttactctctcataattctggaggccagaagtcaaaatcaaggtgtggtagggccctgctccctccaaaagtttaagggggagaattattccttgactctttcaacttctggcagtccctgtcattccttggcttgtggaaacatcactcctacctctgactctgtcttcatatggcatttcctctgtgtctcttggtgtcttttttttttttttttttttttttgagacggaatctcattctgttgtccaggcaggagtgcagtgacatgatcttggctcactgcaacctccacctctcaggttcaagtgattctcctgcctcagcctcccaaatagctgggactacaggcacccgccaccacactcagctaatttttgtatttttagtagagatggggtttcaccatcttgcccaggctggtcttgaactcctgacctcaagtgatccgcccaccttggcctcctaaattgctgggattacagacgtgagccaccatacccggcctggtgtcttttttaaagaatatcagtcactggatttgggcccaccctaatcctaatagtatgacttcatcttaatttaaccaattatatctgtagagaccctgtttccaaataaggtcacattcacagattccaggtggacaagaagtttaggcggacactattcaactcagtacagacccaggaacaaagtccacccactgggctgtgttgagtggcagtcactagtttatcctccctcaacaagatgagctccaggttgacctctgcatccccagtgctcagtcaggacccagcagagcatctgaagggatctggtcaatatgtgtggaactgaactgtttctgaaaagctctgacgtatgttttggaaaatcaaatcttgttttaatccagacaccaatctttttgtaaggcaaacaagtagcataaatgtttaaaagtcaatttgcatgtttatatactgtcattccttaaagttgaagcatgcctttctttattcatcggtggaatcctttctcattttggcaaagaaaatgcccaagtgcctggcacaaacaagcactgagtaaatacttcttgaatgaataaaactagattctaaaaatcatttgatcaaacgcaactccacactttctacttctctccttttagaaccacactgtatttctgctttttttttttttttttttttttggacatagaatctcactctgtcacccaggttggagtgcagtggcatgcaatcttggctcactgcaacctctgcctcctgggttcaagcagttctcctgccttagcctcccatgtagctgggattacaggtacctgccaccatgcccagctaatttttgtattgttagtagagatggaatttcaccatattggccaggctggtcttgaactcctgacttcaagtgatccacccaccttggcctcccaaagtgctaggattacaggtgtgagccaccactcccagcccctatgtctgctttaagtggagaagcagagcttatgagggaggagaacaagggtgcaaaagggacctagatatcactgagaactgcccttgttgtttggttgaggaaatgggcccagacagtggacaagacttgctcagggagacaaacgagatggtgtccagtgcaacaaacctaggtttcctaacttccagttctgtccactctacatcagtgcctctcacctgtccctgcaggttcacattttggttatgtggataaggagaaataaattgaagatcacaatgtcccattttatcttccccaagacaagctctgtaacattaaagaccactatgcaaaccgattactagaaaatgtgtgtggatgggttcggtttttttcctaaggtgttcatgcttactcttttgggcaatatttcaacataatctggcagaaaaagaaacagaagataaagaaaatagctgtaggccgggtgcagtggctcatgcctgtaatcccagcactttggaaggctgaggctggcggatcacttgaggtcaggagttcgagaccagcctggccaacacggcgaaaccccatctgtattaaaaatacaaaaattagccaggcgtggtggcgtacctgtaaacccagctactcgggaggctgaggcaggagaatggcttgaacccaggaggtggaggttgcagtgagctgagattgcagcactgcattccagcctgggcgacagagcaagactgcatctcaaaagaaaagaaaagaaaaaagaaaagaaaagaaaagaaaacagctgtgattcagcaatagtcattttctctccttgtcactgccagagtgaggaagtgctgggttctgtcaacataggctctgacttctcatgaggtgcaagaaagaagcagcatgaacaaaggcatagattttgcacctggagacacgtattctagtcccacctctgacccaaactagctgcatgatcttgggcagccccccagccctctctgggcttcagttccctcctcggtacaatgggaagggtagggaagaggatggtgcctaggatcttcaaagtcccaactctgatgtgctgccattctctcactggcatgtgggaactgagtgtgctacgtggagtcatgagacttcttcttccttttctttttctttttttttttttttttttttttgagaccgagtctcactctgtcgcccaggctggagtgcagtggtgcgatctcggctcactgtaacctccacctcccgagttcaagcaattctcctgcctcagcctcctgagtagctgggattacaggcgcaccccatgcccggctaatttttgtatttttagtagagatggggtttcaccatgttggccaggctggtctcaaactcccgacctcaggtgatctgcccacctcggcctcccaaagtgctgggattacaggcgtgagccaccttgtctgttcagagacttctgacttccgtatttccctcgctaatggcctcacctcccgtttgagtatgtgcagcatgtgcaaattgcagaggaactggggaacttccctgccaggcaatcctgggtcctcttggctctccacttcctccttccttccttccttcctccttccttccttccttccttcctttctttcttccttggtctggctctgtcgcccaggggctggagtgcagtggcggtatctcggtacaaactaagctatttgaaatgcctcggaattcccaaagaaagctcagtaaataccagacagatgaaacggtcctgcccgctctccctctttcagtacccagttttctctttcctctcctttcataacgtttcttcccatcatccctctacctccttatttctgtcagggctgttagatacccttccggtctgttatctcctcctccagccttgtgctacaggacaactcaaaagccccctatggctcccaagtgatcactaaataaaactcgtgatctcacttcagcctacccctgcaggattgctgcggcaaaatggactactcccagaggcgtgatcacggttcggttcactgcagcccagacttcccgggctcaagcgatcccgaacctcccacctcagcctctcgagtagctgggactccagacgtgcaccactacgccaggctcattttgtttattttttatagagacaggctagtctccaacttgtgggctcagagcgatcctcccgcctcgacttccgaaagtgttaggattacaggcgtgagccactgcgtccggctcaatggactccttcttaaatgtgagttctccgcacacactgggccttgctcacctccacgatttaacctcgcagttaagtcccttttcaaggtttttattcgtccttcagcgaagcgctgtcaacgcctccctgcgtctttcccttcttgagcaccagagggcgctcctccgacccgaggaggaagcgactcgggccaacctgtccaggttgtcccacccctttttccttccgggccaatcgttagtcagagtgggcggagccgcccgcgggcacctgcgcgttaagagtgggccgcgtcgctgaggggtagcgatgcgggctccggggatgaggtcgcggccggcgggtcccgcgctgttgctgctgctgctcttcctcggagcggccgagtcggtgcgtcgggcccagcctccgcgccgctacaccccagactggccgagcctggattctcggccgctgccggcctggttcgacgaagccaagttcggggtgttcatccactggggcgtgttctcggtgcccgcctggggcagcgagtggttctggtggcactggcagggcgaggggcggccgcagtaccagcgcttcatgcgcgacaactacccgcccggcttcagctacgccgacttcggaccgcagttcactgcgcgcttcttccacccggaggagtgggccgacctcttccaggccgcgggcgccaagtgagtgtggtcccggggagcggcgccccttcccggctcgggcggcaaacaggaggtggggctgggcggccagctggggcgcgcagctgccggtcgcccccatgaccccggggcccgcgtgtggcctcctgcggccacaggagtgagcctggcacacctgatgaggaggaggaggtgcgtttgactggggactgataaatgaaggttcagggagatggcaggctgggaagccctgggtatctgcacctgtgcaccgagagggctgagttaggccatacctgatgtccctttcagattgacagcactatcaggactccagggtttcaaatcagtggtgtggagcctggttctaattcaactgtgaacctggacaagtcacttcagcctccctgcagcctcttctatggttgtagaaaggggttatataaggatacaaccctttgagccctaatgtctctaagagggaaagagaggggagttctggtgtgcagtgtatttgggcaacagtacagatagtcattcgtttgctcctctcaatcccttttacgtaggaagtgtccaggaagggtctgactctctctgagaactgttggaacttgggggtggctggttcagagaacagagtagagagcgctggggtggggataaggggagaccacgacccatgaagttgtcaaggcaggggcttgtcctgaaggagtgagccttgagagccctgtattgacagatgttaagtcagggagtggttactatcagcttctagaaagattcattcggctgctgggagagaagtgggttggagaagagtaaaaatggaggcggggaggtttccccagcccctggcttagagcagtcttccatccttaccttggttcctcagccatcttccgggttttcgtttctcttgaactttgaattcacttgtactaaagagaagttacaactggcatttagtgtttgccattaaatgtatgggagtataagacttgattaagcagaggaagtgtttgtctcctaggggccttagggatccataacttacaagtgagaaaaattaaaatctgggagataacctctttccatgccttttatttcatggatgagatgactggcccaaagagaggaaggaatataatgtcctagactccaggtctcatgacgtcaaggttgtttccactgcaccagggtctgcaaactggccagagggattggtcctctgccagttttttaaggcccatgaggtgagaatggtttttacatttttaaagggttgtaaaatgttttaaagaagaatacactacagagaggaatgtgctcccacagagcctaaaatactatctggcccttcaaatcctggagttccctactctggccaatgattgaaccataaagtgcattacctatttttgtgccataaaagcaaattaaatattgagtgatttggttgttatttcaacacttgccttttctcccagttattgggtcttttgtcacctctataataaatgagaggcaatttatgtaggcttggtaaaccaaacagcttagttttctagaaagttttctattttgttgttattgttgttttgaaacagttttgctctgtagcccaggctggagtacagttgcatgatctcggctcactgcaacctctgtctcccaggctcaagtgattcttatgccccagcctctcaaatacctgggactacaggcacacaccaccatgcccggctaatttttgtatttttagttgagatgggttttcgcctcattggccaggttggtcttgaacccctgacctcaggtaatccgcccaccttggcctcccaaagtgctgggattacaggtgtgagccaccatgcctggccagcaaatggcttagttttctattatctgccatttccagtagagctctttctccttcagggcaaagaatgaaagaaagttaatcgttcctaccagaagtgttgaagaatcagagagctaaggtgcacttcttttcccttacccactccttccttccctctgggcctcctcctttgctggggactgagggttgggacttcctcaaatctgcttccattcttggagcaatgcccaaggggaattgtgactgcagcagcttcctggatatcactaatatagtcactggtacaagtacatttgttgtggtcaagttctttcagctatttaaaaagcctcaggcatgctgggcaagttcatgcaagttcactgcccacttcctttgctcatgtggttttgctgtccacaggtatgtagttttgacgacaaagcatcacgaaggcttcacaaactggccgagtcctgtgtcttggaactggaactccaaagacgtggggcctcatcgggatttggttggtgaattgggaacagctctccggaagaggtgagtgtccagggatggttactctgttatctctttggatctggctgtcaagagttctgtacctcctctacttgcgtgtgttttctaggtttgcatatagcaagtagcctgaagggcttttggccttctactcctgtgtgttttctaggtttgcatatagcaagtagccggaagggcttctggcctttgaattggcagtgtttgatgcttcacagttttcacgtgaccaaaggggacaccgttacagaagttcatggccatgtctggttagatgaaggatacccaacatagactacgatgctacttgatgtcctgtttgaggagtaggctgagtgtctgtataaatcataaagtttgattggaacacagccatgcctattcatttatgcactgtctgtgactgctttcaagctacaatttgagagctgagatagagaccaaatggcctgcaaaacctaaaacactgtctggatctttaagagttcactggtcgggtgcgttgactcacacttgtaatcccaggactttgggaggcagaggcaagcagatcatgaggtcaggagttcaagaccaacctgaccaatatggtgaaaccctgtctctactaaaaataccaaaattagccgggcgtggtggcgtttgcctgtagtcccagcaactcgggaggctgaggtaggagaatcacttgaacccaggaggcggaggttgcagtgagccaagatcgcaccactgcactccagcgtgggtggcagagcgagactccgtctcaaaaaaaaaaaaaaaagaaaaaagacaaaaagagtttgctgactcctgtcacctgctcagtttgtttctcagcactgtgctttgcttaaagtcctgctgtaaaactctgagatattgattagatatggacttcaggagtcatgatttttaccatctttatttagtccctgggtcatatgatgaaatacttcagttgttttttatctgtgtaattgcttcttgcattataaggtttttgtaacactcaccattcttaacccaaagcaagctttattaaatatgaaaataggtcatcaaccacatttcattttgtgtacgttaagaactattagtttggccaggcgtggtgacttacgcctgtaatcccagcactttgggaggccgaggcgggtggatcatgaggtcaggagatcaagaccatcctggctaacacagtgaaaccccgtctctagtaaaaataaaaaataaattagctgggtgtggtggtgggcacctgtagtctcagctacttgggaggctgaggtaggagaatggcgtgaacccgggaggtagagcttgcagtgagccgagattgcgccactgcactccagcctgggcgacagagcgagactccatctcaaaaaaaaaaaaaaaaaggaaaaaaagagaaagaactattagtaaatcttagataaataaaacgataaacctatattcatttcaactgtgtggaaaatgttactaatgattatttctgagtaagagtactttgcatatttgattttctattttccagtttctttaaatatgaaattttatgattgacagggaagacattttttaaaaataaggctatatggttttttgttttgttttgttttgtttttgttttgagacagggtctcactctgtcgcctttgctagactccagtggcacaatcttagctcactgcaatctctacctcctgggctcaagccatcc

SEQ ID NO: 932 - DNA, 1906 bp, Homo sapiens
caaagccttctagacaagctcagtggaatctgaagggcccaccccatggaggaatgctgggtgacagagatagccaatggctccaaggatggcttggattccaaccctatgaaggattacatgatcctgagtggtccccagaagacagctgttgctgtgttgtgcactcttctgggcctgctaagtgccctggagaacgtggctgtgctctatctgatcctgtcctcccaccggctccgccggaagccctcatacctgttcattggcagcttggctggggctgacttcctggccagtgtggtctttgcatgcagctttgtgaatttccatgttttccatggtgtggattccaaggctgtcttcctgctgaagattggcagcgtgactatgaccttcacagcctctgtgggtagcctcctgctgaccgccattgaccgatacctctgcctgcgctatccaccttcctacaaagctctgctcacccgtggaagggcactggtgaccctgggtatcatgtgggtcctctcagcactagtctcctacctgcccctcatgggatggacttgctgtcccaggccctgctctgagcttttcccactgatccccaatgactacctgctgagctggctcctgttcatcgccttcctcttttccggaatcatctacacctatgggcatgttctctggaaggcccatcagcatgtagccagcttgtctggccaccaggacaggcaggtgccaggaatggcccgaatgaggctggatgtgaggttggccaagaccctagggctagtgctggctgtgctcctcatctgttggttcccagtgctggccctcatggcccacagcctggccactacgctcagtgaccaggtcaagaaggcctttgctttctgctccatgctgtgcctcatcaactccatggtcaaccctgtcatctatgctctacggagtggagagatccgctcctctgcccatcactgcctggctcactggaagaagtgtgtgaggggccttgggtcagaggcaaaagaagaagccccgagatcctcagtcaccgagacagaggctgatgggaaaatcactccgtggccagattccagagatctagacctctctgattgctgatgaggcctcttcccaatttaaacaactcaagtcagaaatcagttcactccctggaggagagagaggggtcttggcactctcttcttacttaaaccagtcccaggcacctagacacggacccgtttttgctgatgagtgttgggactgactcctggaagacagcctggccttgcccacctgcacacagtctgttggataggtagggccacgaggagtagccaggtgggcgagacacaaaaggcctgggacagggctcagtacaagtcaggtcaggcttcatgcctgcatcctccagagaccacagggagccaaagcgagcctccaggcccagcaatgagggacttgggagaaatctgagaagaatgggttgttctcttgggaagtcagggtatcagatgggatggacatccaggtcttctctctgcctaattgtcaaggcctccttggctctggagctatgaaaggccccactttcaagtcacccttgccactgaggaccgaggactatgctatgatgaggattaaggtgttgacttgcctctttcagagataaatgacaagccttcagtttggggcatcctgttgtttgggcgaggaccctctctgatattctgataatccccacctgtaacctcaggtccctggaaatacagaggaggctgggatcgcctgagacacaaaaatctttggagaattttcttgaccctctgaagtccttccagcagcagtcctggtggtgctgctggaagcaggcaatgtcctagtctaacctaactcg

SEQ ID NO: 933 - protein, 360 aa, Homo sapiens
MEECWVTEIANGSKDGLDSNPMKDYMILSGPQKTAVAVLCTLLGLLSALENVAVLYLILSSHRLRRKPSYLFIGSLAGADFLASVVFACSFVNFHVFHGVDSKAVFLLKIGSVTMTFTASVGSLLLTAIDRYLCLRYPPSYKALLTRGRALVTLGIMWVLSALVSYLPLMGWTCCPRPCSELFPLIPNDYLLSWLLFIAFLFSGIIYTYGHVLWKAHQHVASLSGHQDRQVPGMARMRLDVRLAKTLGLVLAVLLICWFPVLALMAHSLATTLSDQVKKAFAFCSMLCLINSMVNPVIYALRSGEIRSSAHHCLAHWKKCVRGLGSEAKEEAPRSSVTETEADGKITPWPDSRDLDLSDC

SEQ ID NO: 934 - DNA, 191284 bp, Mus musculus
  misc_feature (1)...(191284): n = A,T,C or G
ctctgctggccgagggttgaggcgtgaattctttacaaggctcagtgggaagggagctgtgctcttcccttccttttcctactcacctttaggttctaccaatgctgtgtttgcggatttccaaaaaattcaaccaatgtgtgcacctgtgagggagtggaatatgtatttatattaaatatctttagatcatactaaaatctctgcaaagtggctgcttttgtgggtaaagtatttgtgtaggagccgtgcttcttatgaatctgtgatcacttgggcgactgaagcggaaggatcgtaagtctgaggtgagatcctgcttcaaaacaaagctaaagtaaagtaacttaaacacactttgagaactcctgctttgaattactaatagtgtgattataaatgctcccatttgttgactgtctaccatgtgctggcttgcttaagactatcatgttaaattagccatggtaaatactcctgtaatcctagcacttgggagcaggtggaagcagaaacttcaggagttcaagaaaatcttgatttataataagttagaggcagcttgtgctgactgagacgctgtctcaaaatccacttgtctgtcctgtacagtttaggatgtgcggcttggcagtggatttgggttgcagttcaggtctaactttaaaatgcacaattttgcccttatattgcagtatatcttgggttacatgaattggtgagatttatgtacaatactatgtagtcttgaatgtcccattggtcagttagattgtgcatttttattttattttattttttggttttttgagacagggtttctctgtgtagccctggctgttctggaactcgctctgtagaccagactggcctcgatctcagaaaaatttgcctgcctctgcctcccaagtgctgggattaaaggtgtgcgccaccactgctcggctagattgtgcatttttaaaactttttttttttttaaagtgaacatggaggtatatgcctgtacccatcttctcaggaggccaaggccaggtggattgcttgagcctaggcagtagagtgagtgtcccccatttcccaaaacaaacagatttgcatcctgagttttggtctgttggggcatacatattgtggcgatgatgtggccaccttagttcttatgtgctgacttaaaggtggaatttgctttgctgccagcttagagccggtctggttccctttgtgagggtatgattcctgggacagggcagagctgagcaagccagggaaggaaactggctgctaagatgaagagattatatataacttgtccgagggacagcgtcgtttatccagtgtatattgtatttggtgccactgtgtagaaaccaatagctggtgtgatgaaccagttaacactcaggtacatctacttgcttccttttacctttaaagtacttttaaatttttgctagggtctcattatgtagccttcgctaacctggaacttgctgtgtggaccaggctggcctcaacctcaaagagatcctcctgcctctgcctctctgcccctctgcgcccctctgcgcctctctgcctctgcctctgcctgccaagggctggcataagtcacccccacccactccatcttagaacctttatccagctgtccttgtttttatacttgccagtgacccatgtcttagccatttctcccttctaagcctctagtcattggtattttgggtcattttagaacatcactaattttagaagcatcctttagagttgtgatcactaattttagaagcagcctttaaaggttgctaggatgtgtatgtgtagacattctctgcaagatacatgagcagctaaggagtggcgactggggattcagacggggcaagtgctccccagagcttgcttacagtgctgtaggtgtgacggactcttttcttcagtagtgacagcgatcttagaagaaccctgaggaacacagcatgtctgtgagctctagacaacggtcgtgtctttacttttctttgtcttgtttttgaaatgctttttattttgaggcagggttttgttctgcagtcctggttgacctagtatttactatggagtacatttgtaggtcatgaagccataaagatgagcttgcaaactctccatgggcttggctttctactgtggccattacaggagttagctgtgtggccttgaggaggtcactccaactctctgcctttttacccctttcccgttttcccgtgtgttagccatggctttactctgtgtatttatttcaggatctcttctacatctctgttgtaatttcatatccagtttataccagaagatgaagtccactcttccttaactctgacagaaaactttctaattaccacggatctagtaacctttagtaagttttaattaacctggtcttgcaacctgatttgtctcccaggtgagctgtcttgaggcttccttaagttgtccataagcatttataaaatcttacggagagggagcctggaaatttccatccatgaaggcggatgtgaggcacaccaccatttctggccttaacagtagagaatgagtctttgcttacagccccaaagggcatatgcggtctccatgcttgctgtctgtagctcctcaagggttctctaccacttctactccaggctttagctcctgtaggattagaacacttggggtccacaccaaagcttgcttattgtttcaaaagcgataaggttagtggatgttggtggtgtcaggttgtgctgtgctatgcaactgcagtcttgagaattttttcagagaggttcctttggggatgtggccttttgaaacacctggtgcagatgttaagcctcctgctgtcccatcaagcaaaattgatgggattatgggtcccaagtcactcacagagacagatgacagtgcactgtgtgcttctgagtgaaaggacgagtgggacacaaagctgcagctcccagctagagctgcagagaggctgtgggagcagagtctttctctctgctccctggtggtagacacgctcagtggctgcccgcttgcagagctctcccgtgtccatggaccttcagcctagttgtctcgaggagatggcctctacagaagctgacccatcttcctcttcatttgccctttttttgtttttcttaaactatatactgtgacattgaaaggacttgtgttcaccagaaagacaaagagggctttcatggtggggctctgcagagccgctgtgtgggcctttgttgggcttgcgctggcccactgcataccacccccacctcgcaggctgcactttgcatctgtaacagagaagttggcctctttatttaatggtacacagttgcaaaagtaaaatcagatttcttggagtcaatgtaaactgaggtcttccctgtttttggatcgggtatggaacccttttgcacggaggtgccacacactgagccttggtcttgttaaaatcattttctattatttaaaattcaaatgttttgtttttgtgtggctgcagctctgtgacttcattgctatgcttagtatttattcatgagatataagaatcggtcagcagtgtcaggtgttatttcagttcatttttaataaaagatttgtgtttttgtgtgcttacacaaacacacatgcatgtgtatacacgtgcgtgcatggacacatacattctaggcatttgagtgcaggtgtagtggaggccagaggctttggcgccccctgaagctggagttaaggttaattacacgtggnnnnnnnnnnnnnnnnnnnnnnnnnnnnnnnnnnnnnnnnnnnnnnnnnnnnnnnnnnnnnnnnnnnnnnnnnnnnnnnnnnnnnnnnnnnnnnnnnnnnnnnnnnnnnnnnnnnnnnnnnnnnnnnnnnnnnnnnnnnnnnnnnnnnnnnnnnnnnnnnnnnnnnnnnnnnnnnnnnnnnnnnnnnnnnnnnnnnnnnnnnnnnnnnnnnnnnnnnnnnnnnnnnnnnnnnnnnnnnnnnnnnnnnnnnnnnnnnnnnnnnnnnnnnnnnnnnnnnnnnnnnnnnnnnnnnnnnnnnnnnnnnnnnnnnnnnnnnnnnnnnnnnnnnnnnnnnnnnnnnnnnnnnnnnnnnnnnnnnnnnnnnnnnnnnnnnnnnnnnnnnnnnnnnnnnnnnnnnnnnnnnnnnnnnnnnnnnnnnnnnnnnnnnnnnnnnnnnnnnnnnnnnnnnnnnnnnnnnnnnnnnncacgtgcgtgtgtgtgtgtgtgtgtgtgtgtgtgtgtatgtatgtgtgcgcacgcacacacacactcgtgcatttgttctcgagtgaaacactggcagcaacaagaagacattgaagtttttgcttagcttttgtgtgtacatgtgtgcctctcatgtaaacatgtgtgcctctcgtgtatacacgtgtgcctcttgtgtgtacacgtgtgtctcttgtgtgtacatgtgtgccatatgttgctgtgagagtgagtgactgaggtcagctgtcttctgtcatgttaccttcagttttgaggcagtctctcacctgacagtagtgagcccaggagcctcctgtgcctgcccactccattgctggtattcctgcccccccccccccccattgcacttagctactttgcaggacgctgaggggcggggtttggagcttcgtgagtatgtggcatttcttcagacactgccaccccacttgtttgtttgtttgtttgtttgtttgtttatttttgagacagggtctctacagagccttggctgttctggaaatcattttgcctccccttgagtgctggggttaaagatgtgtgtctccatgccctgcttgggtgctggggttagagatgtgtgccaccatgccctgcttgtcctttgttttttgaattacggttatcccgtgttcctcattaagcactcacacttattgtctttgatgaagtagcaaaagctattaattatattaaaccctgactctgaatatacacagcctttttaatactccttgagaagctgggggttacatataaggcactgtctaatagtagtcttacctaagaacacatacatctggctgttgtactacacacctgtaattctccagtactggagagacgaggcaggaagagtccgtctccagtccagcctgggctacatgagtctgttttagcgaaccaaataaccccgaatcaaaccaaatcattttcccactcctccaaagacatcctgttgtctgtgttcctgtctctccagattacaagttagtggacctacctacctaaagtattaactagtgtagttggggttagttgccttagtcacactgatttacaatgataaaacattcatcatagcaattcaagctaagaaatcaccagtggagagagggcgctgctgtacacactgcggctgcagaaagcctggatgtggtgtctgtctgcctgcgcctctcttggcctcctagggctcctgcacatacctggcaaacactcacaagtacaaataaaccttatttaaaatatttaaaaatttaaaaagaaaatacttttagtctaaaggggcataaacagcctgtgtcttaggctaagtccagtcagctctaaaatcacttcacacgcttcacacgcttcattccagagctcacctctgagcggatagatacccagcagcgccgacacaccagctagggtttttagtaaagaggtgggctaagcttcaagttagtgaagtatctgctcagggtttctgaggattgcatttaagtaaatctccctttctttttgagttgtgtatgcacacacacgctcatgagtgcaggggcccacagaggccagaaaaggatgtcgggtcctctggagctcaagtcggaagtgatttttcgctgcctgatgtgagtgctgggaactgaactcagtcctgagccgcatctccagccttctctcttgcttatctttttaggcaagatctctgaccagtccaggctactctcctgcctcctcttcctgagctaggattgcagccaccacacccagtgccctcggttttttgtttttttcttcctttcctttcctctttcctcccctcccctcccctcccctttcctttcctttccttggttggatttggaaccaggcttggtctacatcgattgatttttattttcctgggctttgtttttaaatagaactgtagttttgttttaaacagtcaacggtaattttttttgttaatttgcagaatataaaaatgaaatcagcatttttatttgtagaaacaggaagaatatttgttcctgtaacatgggcaaatgatgtctctagcaatcctgtaattacagtcatctgattaaccagcagaggaaccgagagcagaagtcctgagtggctcagcttctcgggcagaacactagggactccctggagaactcttctcccatcgtgagaattagttcttcctggaaacgcaacggttgttggcagtagagcagtcgtgtggctcactctccatctgctgtaagagccatagaatagtgtgtgatgtgtgtgtatggtgtggtgtggtagattgtgtataaaatgtgtgtatgtataatgtgtgctttgtatagtgtatgtatatagtatatgtgtgtgtgtatacatatatatatacatatatacacacacatgcatacacatactccacacagtatgtatgtgtggtgtgctgtgtggagtatgtgtatgcatcgtgtgtgcacacacagtgggtgtgggctgtgcatgtggattgagtggtgtgtatgttgcgagtggtttggctgaggcgcttcctttctgtgatgtttcagctcctctccagcacagcgtttacggctttgtgaggggacatggacagtgtgtttagctgttgtgtgaggttgctagtttaagaacgtctagagactgctatagtctctttagacattttaatgattaaagcacagggtgtgtttgttttgttttcagtcttctgagctggctgcttggatataaagaatctactaatgagtcagcctttggcaactcagagtcattcttaaaaaatcaagcacaaaacacaacacagcacaacagaaaacagcttttttcctttcattctatttattatttataagatttattcatttcatatgtatgagagttttgcttgtatgtatgtatatgtttgtatgagtgtatgtatgcaaaccacgtgcatttcttttgcctgtggaggtcagaagaaggaattagctcctctagagctgcagttagaactagtctgagctaccatgttgtgttggtaactgagggcagacagggagtgtctcaattcctcagctatttctctagctcttcgctttttgaaggagtctcactgtgtaaccctgactggcctaactgaacgcaccctgtgaccattcttgcctctgtctcctcggtgctgagcgtccagttgcaagccgccacacctgttcatagctcatgatttgtctcccacactctttcagtgaatcacaaagaaaccttatatgagaagtattaaggattttgttgagggaattttttttcacttggggtttataacacattacttaaaaaggagttgactggctggagttaggctacaggattgttggctttatttatttatttatatgtgaaagtaaaataattgggttagagagatggctcagcggttaagagcatcgactgctcttccagaggacctgagttcaaatcccagcaaccacatggtggctcacaaccgtctgtaatgggatccgatgccctcttctcgtgtgtctgaagagagcaagagagcagtggtggagtatgtatactcatatgtataaaataaataaatcttaaaaaaaaaaggtaaaataatttgtatcatttgtatctattgtagaaggcacataacctggccatgtcacagtgtcatgcagagacagtgctgtggcctttgtcactctcacagatgtcagacgggaagcactggaagcagcactgtccccatagccacactggctgagatggctcctatctctcccccatagccacactggctgggatggctcctatctctcccccatagccacactggctgagatggctcctatctctcccacatagccacactggctgggatggctcctatctctcccatagccacactggctgggatggctcctatctctcccatagccacactggctgggatggctcctatctctcccccatagccacactggctgagatggctcctatctctcccacatagccacactggctgggatggctcctatctctcccacatagccacactggctgggatggctcctatctctctcccatagccacactggctgggatggctcctatctctcccccatagccacacaggctgggatggctcctatctctcctacatagccacactggctgggatggctcctatctctcccccatagccacacaggctgggatggctcctatctctcccccatagccacacaggctgggatggctcctatctctcccccatagccacacaggctgggatggctcctatctctcccatagccacactggctgggatggctcctatctctcccccatagccacactggctgggatggctcctatctctcccatagccacacaggctgggatggctcctatctctcccccatagccacactggctgggatggctcctatctctcccccatagccacacaggctgggatggctcctatctctcccccatagccacacaggctgggatggctcctatctctcccatagccacactggctgggatggctcctatctctcccccatagccacactggctgggatggctcctatctctcccccatagccacacaggctgggatggctcctatctctcccccatagccacactggctgggatggctcctatctctcccatagccacacaggctgggatggctcctatctctcccacatagccacactggctgggatggctcctatctctcccccatagccacactggctgggatggctcctatctctcccacatagccacactggctgggatggctcctatctctcccacatagccacactggctgggatggctcctatctctcccacatagccacactggctgggatggctcctatctctcccacatagccacactggctgggatggctcctatctcccagtttgaagttgaataaaatgagtcttctttcttttaatgcaatgtcttttttgtgttctgaaatattttaagtgactgctggagtacctgattttgcaaatggaaagctggtgggttgttggagggtaattagctcaattaaaacatttatagggccaggcagtggtggcaaacgcctttaatcccagcacttgggaagcagaggcaggtggatttctgagtttgaggccagcctggtcttcagagtgagttccaggacagccagggctacacagagaaactctgtcttcaaaaaaacaaaaaacaaacaaacaaaaaagatttataggaataacaactacagaaaacaagggaacaagtgtgtttgccctgccctgtgtatggttagaacagaggggaacacagccaacggtttctccagcttagccttaaaccaaggcagcctctccggtgctggctgaccttgctttcctcgctgtgcgctgtgttgcttgctcctctctaacggcggttgactctcaggatggttttgaatgctctggccctacttttcatgtccagtgggaacgatgtggagaaatggagctaatctcatcaggaggtttgaaatggttgcttttccagtttcttgggaggagtaagtgtccagggccaaaggttgggtacaaagtgtgggtccctggctggacactctgccactgctgagccgttctgcttgagttctcttttccttaactcgctcgccttccaggattccacgaggaccggtgcagcagcctttggaggatcggctcttcccacctacggtctctgcagtctatagcacggtgagcatcccggtggctggcaggctggctgtgaatgcagtgcctggggtggaaaagtcaacaaaatcccagtgagatcaggtgcatgttacgtgaccaggtaaccttcactcacattgacatctaaggaggagacctgaggtgaacattgtgttgtgatccactgtagttctacacccgccctttcccttccccctttcctacatgtggattaaaccctggggacatagtacatgtgtgtactagatgctcaggcacgccaccgcaatgacagcctccactgcttggaaagnnnnnnnnnnnnnnnnnnnncccctcccctccccctttcctttcctttccttggttggatttggaaccaggcttggtctacatcgattgatttttattttcctgggctttgtttttaaatagaactgtagttttgttttaaacagtcaacggtaattttttttgttaatttgcagaatataaaaatgaaatcagcatttttatttgtagaaacaggaagaatatttgttcctgtaacatgggcaaatgatgtctctagcaatcctgtaattacagtcatctgattaaccagcagaggaaccgagagcagaagtcctgagtggctcagcttctcgggcagaacactagggactccctggagaactcttctcccatcgtgagaattagttcttcctggaaacgcaacggttgttggcagtagagcagtcgtgtggctcactctccacctgctgtaagagccatagcatagtgtgtgatgtgtgtgtatggtgtggtgtggtaggttgtgtataaaatgtgtgtatgtataatgtgtgctttgtgtagtgtatgtatatagtatatgtgtgtgtatacatacatatatatatatatatatatatatatacacacacatatatgtatatatatatatatatatatacacacacacatatatgtgtgtgtgtgtatggtgtggtgtggtagattgtgtataaaatgtgtgtataatgtgtgctttgtatagtgtatgtatatagtatatgtgtgtgtatacatatatatacatatatacacacatatatgtatatatatgtgtatatatatatgtgtatatatatatgtgtatatatatgtgtatatatatacacacacacacacacacacacagtatgtatgtgtggtgtgctgtgtggagtatgtgtatgcatcgtgtgtgcacacacagtgggtgtgggctgtgcatgtggattgagtggtgtgtatgttgcgagtggtttggctgaggcgcttcctttctgtgatgtttcagctcctctccagcacagcgtttacggctttgtgaggggacgtggacagtgtgtttagctgttgtgtgaggttgctagtttaagaacgtctagagactgctatagtctctttagacattttaatgattaaagcacagggtgtgtttgttttgttttcagtcttctgagctggctgcttggatataaagaatttactaatgagtcagcctttggcaactcagagtcattcttaaaaaatcaagcacaaaacacaacacagcacaacagaaaacagcttttttcctttcattctatttattatttataagatttattcatttcatatgtatgagagttttgcttgtatgtatgtatatgtttgtatgagtgtatgtatgcaaaccacgtgcatttcttttgcctgtggaggtcagaagaaggaattagctcctctagagctgcagttagagctaagtctgagctaccatgttgtgttggtaactgagggcagacagggagtgtctcaattcctcagctatttctctagctctttgctttttgaaggagtctcactgtgtaaccctgattggcctaactgaacgcaccctgtgaccattcttgcctctgtctcctcggtgctgagcgtccagttgcaagccgccacacctgttcatagctcatgatttgtctcccacactctttcagtgaatcacaaagaaaccttatatgagaagtattaaggattttgttgagggaatttttttcacttggggtttataacacttaaaaaggagttgactggctggagttaggctacaggattgttggctttatttatttatttatttatttatttatttatatgtgaaagtaaaataattgggttggagagatggctcagcggttaagagcatcgactgctcttccagaggtcctgagttcaaatcccagcaaccacatggtggctcacaaccatctgtaatgggatccgatgccctcttctggtgtgtctgaagagagcaagagagcagtggtggagtatgtatactcatatgtataaaataaataaatctttttttaaaaaggtaaaataatttgtatcatttgtatctattgtagaaggcacataacctggccatgtcacagtgtcatgcagagacagtgctgtggcctttgtcactctcacagatgtcagacgggaagcactggaagcagcactgtcccccatagccacacaggctgggatggctcctatctctcccacatagccacacaggctgggatggctcctatctctcccacatagccacacaggctgggatggctcctatctctcccacatagccacacaggctgggatggctcctatctctcccacatagccacactggctgggatggctcctatctcccagtttgaagttgaataaaatgagtcttctttcttttaatgcaatgtcttttttgtgttctgaaatattttaagtgactgctggagtacctgatttttcaaatggaaagctggtgggttgttggagggtaattagctcaattaaaagatttatagggccaggcagtggtggcaaacgcctttaatcccagcacttgggaagcagaggcaggtggatttctgagttcaaggccagcctggtcttcagagtgagttccaggacagccagggctacacagagaaaccctgtcttcaaaaaaacaaaaaacaaacaaacaaaaagatttataggaataacaacaataacaactacagaaaacaagggaacaagtgtgtttgccctgccctttgtatggttagaacagaggggaacacagccaacggtttctccagcttagccttaaaccaaggcagcctctccggtgctggctaaccttgctttcctcgctgtgcactgtgttgcttgctcctctctaacggcggttgactctcaggatggttttgagagctctggccctacttttcatgtccagtgggaacgatgtggagaaatggagctaatctcatcaggaggtttgaaatggttgcttttccagtttcttgggaggagtaagtgtccagggccaaaggttgggtacaaagtgtgggtccctggcaggacactctgccactgctgagccgttctgcttgagttctcttttccttaactcgctcgccttccaggattccacgagggaccggtgcagcagcctttggaggatcggctcttcccgcctacggtctctgcagtctatagcacggtgagcatcccggtggctggcaggctggctgtgaatgcagtgcctggggtnnnnnnnnnnnnnnnnnnnnnnnnnnnnnnnnnnnnnnnnnnnnnnnnnnnnnnnnnnnnnnnnnnnnnnnnnnnnnnnnnnnnnnnnnnnnnnnnnnnnnnnnnnnnnnnnnnnnnnnnnnnnnnnnnnnnnnnnnnnnnnnnnnnnnnnnnnnnnnnnnnnnnnnnnnnnnnnnnnnnnnnnnnnnnnnnnnnnnnnnnnnnnnnnnnnnnnnnnnnnnnnnnnnnnnnnnnnnnnnnnnnnnnnnnnnnnnnnnnnnnnnnnnnnnnnnnnnnnnnnnnnnnnnnnnnnnnnnnnnnnnnnnnnnnnnnnnnnnnnnnnnnnnnnnnnnnnnnnnnnnnnnnnnnnnnnnnnnnnnnnnnnnnnnnnnnnnnnnnnnnnnnnnnnnnnnnnnnnnnnnnnnnnnnnnnnnnnnnnnnnnnnnnnnnnnnnnnnnnnnnnnnnnnnnnnnnnnnnnnnnnnnnnnnnnnnnnnnnnnnnnnnnnnnnnnnnnnnnnnnnnnnnnnnnnnnnnnnnnnnnnnnnnnnnnnnnnnnnnnnnnnnnnnnnnnnnnnnnnnnnnnnnnnnnnnnnnnnnnnnnnnnnnnnnnnaaaaatttcagtttccccttcgtaaatgagtgtttttcccctcccctccctggttacatataaaatatgcatcagtattgggaagtgagtataagagattgatatcaatcgtgttgaatgaggaatcgataagagaaggctcacttttcagtcataggatgcgtttgctaaagtggtaagttctcccgtgaacccatgagaacttgagagactgagtaataggtcccattcttcctgccatctcgccctgtgttgtaacggctgagttctgagtcactgtcgctcttggccagtattagagagtgagcccagggcctgggaagtgctaggtagtgcctgccactgagaagagtttgggtatgttgtctttaaacagaagaaaggcttcacgtagtttaggtgtttgtattaaatgctttggtagaatacagtaaggtaaatgggtagagattttctttgaaaagacattttagggtctagaaagcctggaatggctgtgcactctgtaatgccagcacgtggaggccaaggctggaagactctagtctcaggctagcttgaggtacttggtggacccttgcccagcgtgtgcactgttctggattcaggcgccacactgccaggaaaagcaagagcagtggtggctaaagaccttgcagtacagagcccctgagatggccatgggtagcagaggcttcaaagtgcacatgcttgcatggagagatgttggacttgcgtcatgagattacacagggaattatggggtataggacatgaggttacatgggggaattatgggttgtgggacatgagattacatggggaattatggggtataggacatgagattacatggggaattacgggttgtgggacatgagattacatggggaattacgggttgtgggacatgagattacatggggaattatggggtataggacatgagattacatggggaattatggggttaggacatgagatacatggggaattattggatgtgggacatgaaataccagggaaatattgggcacatagaggttttagagcttatcctgtctaatggaatacaaagggagggtaaagagaaacagaaccaattgcctttaaattggcgctatagctacagcatgggaatggaggatggaggcgagtgagacacaggagggtcaggaaagacattggccagttggtgtcttagccaggtttccattgctctgaagagataccatgaccaaacttctcgagacaaggcttctttgaatagctttgggtgacctgacactaactctgtagaccaggctgccctcaaaactgagatcccctgcctctgcctccatagtacttggagtaaaggcgtgcgtcaccgcatctggccttgactgaagcaactcttacaaannnnnnnnnnnnnnnnnnnnnnnnnnnnnnnnnnnnnnnnnnnnnnnnnnnnnnnnnnnnnnnnnnnnnnnnnnnnnnnnnnnnnnnnnnnnnnnnnnnnnnnnnnnnnnnnnnnnnnnnnnnnnnnnnnnnnnnnnnnnnnnnnnnnnnnnnnnnnnnnnnnnnnnnnnnnnnnnnnnnnnnnnnnnnnnnnnnnnnnnnnnnnnnnnnnnnnnnnnnnnnnnnnnnnnnnnnnnnnnnnnnnnnnnnnnnnnnnnnnnnnnnnnnnnnnnnnnnnnnnnnnnnnnnnnnnnnnnnnnnnnnnnnnnnnnnnnnnnnnnnnnnnnnnnnnnnnnnnnnnnnnnnnnnnnnnnnnnnnnnnnnnnnnnnnnnnnnnnnnnnnnnnnnnnnnnnnnnnnnnnnnnnnnnnnnnnnnnnnnnnnnnnnnnnnnnnnnnnnnnnnnnnnnnnnnnnnnnnnnnnnnnnnnnnnnnnnnnnnnnnnnnnnnnnnnnnnnnnnnnnnnnnnnnnnnnnnnnnnnnnnnnnnnnnnnnnnnnnnnnnnnnnnnnnnnnnnnnnnnnnnnnnnnnnnnnnnnnnnnnnnnnnnnnnnnnnnnnnnnnnnnnnnnnnnnnnnnnnnnnnnnnnnnnnnnnnnnnnnnnnnnnnnnnnnnnnnnnnnnnnnnnnnnnnnnnnnnnnnnnnnnnnnnnnnnnnnnnnnnnnnnnnnnnnnnnnnnnnnnnnnnnnnnnnnnnnnnnnnnnnnnnnnnnnnnnnnnnnnnnnnnnnnnnnnnnnnnnnnnnnnnnnnnnnnnnnnnnnnnnnnnnnnnnnnnnnnnnnnnnnnnnnnnnnnnnnnnnnnnnnnnnnnnnnnnnnnnnnnnnnnnnnnnnnnnnnnnnnnnnnnnnnnnnnnnnnnnnnnnnnnnnnnnnnnnnnnnnnnnnnnnnnnnnnnnnnnnnnnnnnnnnnnnnnnnnnnnnnnnnnnnnnnnnnnnnnnnnnnnnnnnnnnnnnnnnnnnnnnnnnnnnnnnnnnnnnnnnnnnnnnnnnnnnnnnnnnnnnnnnnnnnnnnnnnnnnnnnnnnnnnnnnnnnnnnnnnnnnnnnnnnnnnnnnnnnnnnnnnnnnnnnnnnnnnnnnnnnnnnnnnnnnnnnnnnnnnnnnnnnnnnnnnnnnnnnnnnnnnnnnnnnnnnnnnnnnnnnnnnnnnnnnnnnnnnnnnnnnnnnnnnnnnnnnnnnnnnnnnnnnnnnnnnnnnnnnnnnnnnnnnnnnnnnntatgggacgaacctaatcagaagtccacagttgtacagacacagatggttgtgttgtaccttggcaggggagtaaggaatgtttatcgtctcctataataaagtcagtaggctatgaagatgtcttgactgtgctgtgtaagagaaagtgtgtcatttctttggagtctgacttgaggaagctagtcctgttggtcctgtccattggggggtcattctgagaaagatttattgacacaagtcaccttcctgtaagcaagtattactttggtattagagcattaggtgattttcatatttttgctgttataaaatagctgaattttataattcctgtgttttggatgatttttatagaatatatttctgaaaatgaaattaatacattaagaacaagtgtgttgcccatatgtgcctgtaatcccagcattagattgtgtgtctgtgtctgtctgtctgtctctaaggcaaggccagcctgggattcatggtgaagtatcctaaaacatgttattaggattcctcatgagtaagactttgacagtatgtacactcacacttggaagacaagtccatgagaactctgagattgacgggatgaccgtgagggaggctgctgccacctgagccttcttaccttgcacagaggtgcttgactgtcaggtgttggtttgtttgtgagttatttgacttttactacttagagttgctgtggtacactcaccatgtgcacattgtatattgtgcttctcctaggaggaggaggaggaacttcaagcattagcagctctcctgaaatacgatgttctcagcctgctgtgctagctcaggtctttcttctcagtactccaaaggcagaggcacgtggatctctgagttgaggccagccaaagcttcagcgtgaggccttgtctcagaaatcaaacccaaaacagcagcagtaacaggaatagcgatgttgttttcttttgtatgttttttttgttttgtatttctggtttctatactctagttcttgctccattgcctaagtggtctaatctgttgggtgaagcagtcctgctgccttaggcttcctactagctggtttcttctccagtttaaaaatgacatttatttattagactttgggacaaggctttacagtgtatccctagccgtccagacttgagatatagactaggctggccttgaactcactgcgctttgcctgcctgtgcctctggagtgctggcatttttaatgaattatttataatctttcttgtttgttagtttgtatgttttacatgagtggtactttctatctctggctgtcctggagcttgctctatatgccagactggcttagatttacggagaccctcctgcctttgcttcctgagtgctgggattaaaggcatgtcctgccatgcctggcaaagtatttacattcttaatagtttcccactcatcacttttacagtactgtgcacattcttgctagtgaggagagagctatgtgactggatgccctcagtcgttagtccccatctcagcaacaggattttgtgtctggtcattatttttctgtaggttctttcggcctacgtctctgtcgtcctctcctgccttggcacgtggtgcacatatgccatgtggtgcccatatgtcactgggattgagttggttaaattccttgaaaggcagtagtactcctggccaatgtttaaagcccacactctgcgtttgtagtggctgctttcccctagattaggagtagtcatttcaggtggaagctctgctgctcatcagaaggaagccagggttggacagacctctgcaatgccttcttatgttagctgggttctttgtatttagttattttaacttggtttatacaaatttgtctttgaagtatttatcaaagataaatcaaatttgagggattggtcctattaatgaaccatgaacattcaaacaagtacttgaaaaactgtaacagtgcagtgtacaaggtagagagaggcactgccacaccagggcactcaggaggcactggctctctgtggtgtgttcattgataactttcaggagtaggagctgtgagataagcctgccgtgcatagcatataattttgtcttctgtattaagagaaatttagttttctgactattaagctagtgtgtgatgtgattgcagtcatacttagtaattgaataacaactgctctcagggcagaagtctctttcgaataactggaaacttgcttatgagagagagactctgtgtgctaagttgctctttaagattagagaatgtctttgatgctgtcagctttgatccttataagcagtttgcactttatatatcatttaggtcctgcttctcgtatcttgtagctggatggaatgtttagaaagatcttgtttccacgatttttcctatagccgctgcatattgagtaggtaggctggcagtggtagtcctactgccgagggacgtgaacttgctccgtcaggtcttggagcatccagccacgtggaagttggcttgcctgtgctgtctccccatcgaataactgtccattgcttttaacccagttggggcagtggtttgttggcaccgtttgctgagctgaagcttacgtgcagtgcaccttaggaagggcaggcatgagaacccaggaaacactcagtgagaacccggagactcttagtgcgtgtgtcttagacaggcctcaaactcagggcagccttccggtctcagcctgctgtcttgggcctctttataacccacttacacactcacactctctcactcccctcccccctttctgagtgtgtgtgtgtgttcattccatgtgcgtgcacacgcatgtttgtgtgctgaaagtgcccggactgaacctgtgtttgagcttgttgaaagcaactgttgctttttccttttttgtttagttagtttgtttttaagatatgttctttatatgatatagcgctggctgccctggaactcactatagagcagagagctggggttatagcatgtataactgttctcagttcctaccttgtcgtttgagaaggtctctcatttgagcccaggactcactgtttggccttgactggctggccaggaaactcttggagtgcctgtttttgtgctgcctatgttggcttcagatgtgtgccagcatgcactgcatttatgtgggtactggggatccaaactcgggtctcgtgattgcacgctctccaccaatcgtgattactgtctctgtagagtactctgtccctgcacctcgggactcagagtctcagtattaacaatctagatctgcttttctgcctgtctttgtaactgctaattaatgacatttatgaaagtttacattctttgttaatatttaatgtggctttctcattaaatgttaaatcagagagctaattaaaatattatttaatatggatttgcttgatttttcctctttcagaagaaggattaaccatggagatgtgaaggcgtgctctctctgctggtaaatgccagctaggaatggctttcagctctcaagcaggagtagggagaatctgcgccagggcgctttgctttggtagaatgctgctttagcctgtggaatattccaccccctgcgccattttataaagtgtcccgagaatcattgctcagaggcagagcagctccatggagcagtagcggtcagacagggcctcgaagttggatgacggttagtgccgtgccaaatgaaggtgcattatctgggcaatagttgtatcatcatcagctaggggcaggatggagggaccatctttaactgtaattgggaccttgcttttgtgaacatgtcttgctactgggactctgccagcccattgtgtttcctgtgacgctagatcccagttcatggttgagcccttgcttagtggctggctctgaggtagggcccgaacactcaaggctgagtatgtatgtaggtgtgaactatttgtgtgactgttccaatcccatatagaactttctatagaagggcattttatttctttagtttttacagattctaaatatccattagatatgttaatttttagacctgtaaaaccactggtacaattttgttttattttgacacagggtttctctgtgtagctctttgtgtagctgtcttggaactcaatttgtagactatgttggcctcaaactcacagagatccacttgcctttacctcctgagtgctgagattaaaggcatgtgccaccacttacatagtgtgcatttttattctttcaagatgaatttttattttattttattttttaaagatttatttattttatgcatgtgagtacactgtagctgaacagatggttgtgagccttcatgtggttgttgggaattgaatttttaggacctctgctcgttctggttaactctcctcactcagtctctgcttgctctggcccaaagatttatttattattatacataagtacactgtagctgacttcagatgcaccaaaagagggtgtcatatctcattacgggtggttgtgagccaccatgggatttgaaatcagcacctttggaagagcagtcagtgctcttaacaactgagccatcttgccagcccctcaaaatgaatttttaaaaaatatatatgtatgcatgggtctatgtgtctgagccatgtgtatggcctgatctgcggaggccagaagagggcattagatcccctgtaactcaagtggttgtgagcttccctaacatgaatgctgggaacagaatttgggtccctctggaatgaaaagaataacaagtattcttaacctccagactattttttcagctcctccattcttatttctttgtttaatttgcttcttgacccaggtccctgtagtcctggctatcctggagcttgctgtataaaccactgtggccacaagctcccagagatgttcctgcctctccctcccatactggaactaaagctgttcatcatcacattcctttcaataagcgtttctttaataatataacttggaagccatatgaaataattatttaagctcccttaaactttgaaagtcctgttcagagagatgtgtgtgtgtctgcctcccatgaagtttatacacatgcacatgcgcacacatgtgaaagaggcatagtattgaaatgtatgattctgataggttctggcttttggaagagaaattattacagtgtatctggaagttggtcatctggagtgctaattgtgttcttgtacaaggtgcatcatccccagcaggaaatgtttggcccagacagggtttggtgggcatgattctttcctcttgtttgtttctttgtttgtttttaaagaagggacccactaagtagacctggatagcctggaacttgttaggtagactaggctggccttgaacttcctgagatctgtctgtctctaactcccaagtgctgggattaacaggcatgcgttctcttcgccacctgggcgcctcctgtcatgctctgggtaagttccatagaagaaaaagaagaggaggaggaggaagtagaaaagggggttctctccctctacttagtcctgactggaaacatagaacacctcacagccagggaagagcagtggagagacttggaaaagagaaatagttttgacgtctgctgaaaataaaagctggcaacacttaacaaaagctgactcctgtcccagatgacacagatagctcacgtgtgtcctgccatagtctgcttgtgtcatgtttgaagtacccacttcgaggtactgtgcctttaaactgctcgtcctaaaggaaaggagagaatggagttctggtagaagcacgccaacagtgccctttcattgttttaaggttagcaaaatatggttgccaagccatggaggcacactgtggagttgaggaaacaatctcttgagatgcgatttagcttgaaattgtgcacaagacagaaactatataattgaaaagggtacataggcttgtgacattggaacacactaggggacttaaaaaacattgaaaatagtatgttggttggattttggcgtgaattgtaagagtgaagttgtagcttccgtgcatgctgatagtgtactggccagaccacagatgtgcagaacatggctgggtgtggccttttgtgtctgatctcagctcccggcaggcagaggtaagatggatcgcagagttcaaggctaacctggtctatagagtgagagaatttgtctcaaaacaaacataaccaaaaattatgtttaaaagcttgcataattgtaagaataaatgtgtgcctaagagaaggttaggttatattcattgcgcagtgtcagaggcctgcaccgggtatggcatgcaagcaagcttcttggttggaagacatgagttcctagctatctgaaaatgtggctgtgtagactgcattcttccccagggatttcaagcttttctcataacccagtgtgaacttttccaaagatgacagacagggttgcagggctacagggatgtaggatgaggagagggtagactgaggcagccaaggaaatgattgttggcaggaaagctcccacctaagtgttcgtagcagctggctatgttggtgcacagtggtcatccaggatagcatgtgcgtgtctagtaggctgtatggataatttatgacgtagttctgtgggctgaagacagcaggcaggacactggggcacagtgccagcactgcttcaaacttgctggaatctcactgttgcgtttttatctagttcccaggtgataccaaggcctctagtctgggacattgcaaaccaccacggtagactaaacccctcctgttctcccaggaatgaaaataaaaaccaaagtgccaatcatttccatctaacactgtctttctagactttaaaccaccgtttatatgttggtaacaaattttgtaccaatattatgaagcacccattagttaatggagtacacaggtgcacatggtagcctgcacttttcactgttttaaggttaaggaaagtagtttattgagtacagtgcaggagggcagtgatgcagtagttagagcttgtatcatcagggcaatgggctgtaagcctgggagaagtcgaggtattattagtgtgtctccaggcatgggattgagactgcttgaaggagaacggtccagattgaccagtgtacagttctgcaaggtccgcttgagtccctgtcaaacttctactctgcagatggtagccatgctagctactcaaacctgtaccattgcaagacagttcctttttctcatttgcagaaaaagaaactannnnnnnnnnnnnnnnnnnnnnnnnnnnnnnnnnnnnnnnnnnnnnnnnnnnnnnnnnnnnnnnnnnnnnnnnnnnnnnnnnnnnnnnnnnnnnnnnnnnnnnnnnnnnnnnnnnnnnnnnnnnnnnnnnnnnnnnnnnnnnnnnnnnnnnnnnnnnnnnnnnnnnnnnnnnnnnnnnnnnnnnnnnnnnnnnnnnnnnnnnnnnnnnnnnnnnnnnnnnnnnnnnnnnnnnnnnnnnnnnnnnnnnnnnnnnnnnnnnnnnnnnnnnnnnnnnnnnnnnnnnnnnnnnnnnnnnnnnnnnnnnnnnnnnnnnnnnnnnnnnnnnnnnnnnnnnnnnnnnnnnnnnnnnnnnnnnnnnnnnnnnnnnnnnnnnnnnnnnnnnnnnnnnnnnnnnnnnnnnnnnnnnnnnnnnnnnnnnnnnnnnnnnnnnnnnnnnnnnnnnnnnnnnnnnnnnnnnnnnnnnnnnnnnnnnnnnnnnnnnnnnnnnnnnnnnnnnnnnnnnnnnnnnnnnnnnnnnnnnnnnnnnnnnnnnnnnnnnnnnnnnnnnnnnnnnnnnnnnnnnnnnnnnnnnnnnnnnnnnnnnnnnnnnnnnnnnnnnnnnnnnnnnnnnnnnnnnnnnnnnnnnnnnnnnnnnnnnnnnnnnnnnnnnnnnnnnnnnnnnnnnnnnnnnnnnnnnnnnnnnnnnnnnnnnnnnnnnnnnnnnnnnnnnnnnnnnnnnnnnnnnnnnnnnnnnnnnnnnnnnnnnnnnnnnnnnnnnnnnnnnnnnnnnnnnnnnnnnnnnnnnnnnnnnnnnnnnnnnnnnnnnnnnnnnnnnnnnnnnnnnnnnnnnnnnnnnnnnnnnnnnnnnnnnnnnnnnnnnnnnnnnnnnnnnnnnnnnnnnnnnnnnnnnnnnnnnnnnnnnnnnnnnnnnnnnnnnnnnnnnnnnnnnnnnnnnnnnnnnnnnnnnnnnnnnnnnnnnnnnnnnnnnnnnnnnnnnnnnnnnnnnnnnnnnnnnnnnnnnnnnnnnnatgtttaccgtctacattgtttgtgttttaagtcattgtttagaatgtaacgatccatgactaaacctcagaaatggggacttggttacagttcttctgtgacacaagctattccaaagcagtctgtgattttgatagtatctttgaatttattatttgttgttgagttctgctagtatcttggaattaagacccagtaccttggatcagttatgtaactaggttattagcaatggaaaatcagcagaaaaagcaagctttaaatataaaactcacattttcagatgggatcagattcccaagcagcccttaactgtatttacaattgccttttggtactcgagcgctctgccctctgggaagcctagaccctccacagtgggtttcagaacttagcaaagagaacatggtgtctgtgttacatggacacagctctggaacccagcacttggaaagcttaagcagaaagattattgtaagtttgaggccagcctgggctacctaattacagtttactctggccatgttgtgagacccttgattcagaaatcccaaatcatagtaaacaaaaacaacagctcagttgttgtcacatctttggactacagggataacagagaaaaaaacccaacagcaacaaaaatcaaaaacaagccttcaaactgtagatagtccttggaaaagacccagcatcgtcgtcatccacgtgcagtgtgtgcctgctctgtgtgcagtgtttctgagtgattggccaaagtaggattgacagcctcctcatccgtctcttcagggcagttagctccagtaggttaagggcagactctcaggtcacttgtctgggttactgtcagcagtagagctattccatgctggctgctctgtgctctaaggttgcccaggccacctcaggtgctcatgagttgctaagctagataaatcttatccctaagtagccatatgataggctgtatggtttgttgaattaatatcatagtgtaatggtagttatatttacatggtcaagagaccacttggtggcaagcaggccacagtgctctgtgagtttgtccatgaggatggacggacagatgaggagagctgggctgctgttgccatgcaggacagccagggcacgggactgcaggtgtgaatgtgccccctttgctcgctcgttggcattttgggggcatttttttggcttttttattttgaggaagggcgatggtcaaattttgctgtggcgtcttaggctggcctcagtctggccttatgtcccaggctgttgtcacacttgaggtcacgtgcccactgtggcatcacgtgtgggattttatagacagtgtggaaactgtcaagttccaaatggcaggtttgaaatatgtgcttcctagaaaaatagaaatctagattaaaatataaggaagaaagtgctgcaccccatggctagcaagctgatagcacctagttttgtatcccccaccttggcctggtgaggtggctcagcagctaaccgtacaagtcaggcaacttgaatttgatcccagatcctcataacttttgaaagttcttctctgagtgctacagggtagatgccaggcgcttagactcacacacatactgaatgccccctccccacacaaaaactttaacattttagatagacatcttacatctgtctgnnnnnnnnnnnnnnnnnnnnnnnnnnnnnnnnnnnnnnnnnnnnnnnnnnnnnnnnnnnnnnnnnnnnnnnnnnnnnnnnnnnnnnnnnnnnnnnnnnnnnnnnnnnnnnnnnnnnnnnnnnnnnnnnnnnnnnnnnnnnnnnnnnnnnnnnnnnnnnnnnnnnnnnnnnnnnnnnnnnnnnnnnnnnnnnnnnnnnnnnnnnnnnnnnnnnnnnnnnnnnnnnnnnnnnnnnnnnnnnnnnnnnnnnnnnnnnnnnnnnnnnnnnnnnnnnnnnnnnnnnnnnnnnnnnnnnnnnnnnnnnnnnnnnnnnnnnnnnnnnnnnnnnnnnnnnnnnnnnnnnnnnnnnnnnnnnnnnnnnnnnnnnnnnnnnnnnnnnnnnnnnnnnnnnnnnnnnnnnnnnnnnnnnnnnnnnnnnnnnnnnnnnnnnnnnnnnnnnnnnnnnnnnnnnnnnnnnnnnnnnnnnnnnnnnnnnnnnnnnnnnnnnnnnnnnnnnnnnnnnnnnnnnnnnnnnnnnnnnnnnnnnnnnnnnnnnnnnnnnnnnnnnnnnnnnnnnnnnnnnnnnnnnnnnnnnnnnnnnnnnnnnnnnnnnnnnnnnnnnnnnnnnnnnnnnnnnnnnnnnnnnnnnnnnnnnnnnnnnnnnnnnnnnnnnnnnnnnnnnnnnnnnnnnnnnnnnnnnnnnnnnnnnnnnnnnnnnnnnnnnnnnnnnnnnnnnnnnnnnnnnnnnnnnnnnnnnnnnnnnnnnnnnnnnnnnnnnnnnnnnnnnnnnnnnnnnnnnnnnnnnnnnnnnnnnnnnnnnnnnnnnnnnnnnnnnnnnnnnnnnnnnnnnnnnnnnnnnnnnnnnnnnnnnnnnnnnnnnnnnnnnnnnnnnnnnnnnnnnnnnnnnnnnnnnnnnnnnnnnnnnnnnnnnnnnnnnnnnnnnnnnnnnnnnnnnnnnnnnnnnnnnnnnnnnnnnnnnnnnnnnnnnnnnnnnnnnnnnnnnnnnnnnnnnnnnnnnnnnnnnnnnnnnnnnnnnnnnnnnnnnnnnnnnnnnnnnnnnnnnnnnnnnnnnnnnnnnnnnnnnnnnnnnnnnnnnnnnnnnnnnnnnnnnnnnnnnnnnnnnnnnnnnnnnnnnnnnnnnnnnnnnnnnnnnnnnnnnnnnnnnnnnnnnnnnnnnnnnnnnnnnnnnnnnnnnnnnnnnnnnnnnnnnnnnnnnnnnnnnnnnnnnnnnnnnnnnnnnnnnnnnnnnnnnnnnnnnnnnnnnnnnnnnnnnnnnnnnnnnnnnnnnnnnnnnnnnnnnnnnnnnnnnnnnnnnnnnnnnnnnnnnnnnnnnnnnnnnnnnnnnnnnnnnnnnnnnnnnnnnnnnnnnnnnnnnnnnnnnnnnnnnnnnnnnnnnnnnnnnnnnnnnnnnnnnnnnnnnnnnnnnnnnnnnnnnnnnnnnnnnnnnnnnnnnnnnnnnnnnnnnnnnnnnnnnnnnnnnnnnnnnnnnnnnnnnnnnnnnnnnnnnnnnnnnnnnnnnnnnnnnnnnnnnnnnnnnnnnnnnnnnnnnnnnnnnnnnnnnnnnnnnnnnnnnnnnnnnnnnnnnnnnnnnnnnnnnnnnnnnnnnnnnnnnnnnnnnnnnnnnnnnnnnnnnnnnnnnnnnnnnnnnnnnnnnnnnnnnnnnnnnnnnnnnnnnnnnnnnnnnnnnnnnnnnnnnnnnnnnnnnnnnnnnnnnnnnnnnnnnnnnnnnnnnnnnnnnnnnnnnnnnnnnnnnnnnnnnnnnnnnnnnnnnnnnnnnnnnnnnnnnnnnnnnnnnnnnnnnnnnnnnnnnnnnnnnnnnnnnnnnnnnnnnnnnnnnnnnnnnnnnnnnnnnnnnnnnnnnnnnnnnnnnnnnnnnnnnnnnnnnnnnnnnnnnnnnnnnnnnnnnnnnnnnnnnnnnnnnnnnnnnnnnnnnnnnnnnnnnnnnnnnnnnnnnnnnnnnnnnnnnnnnnnnnnnnnnnnnnnnnnnnnnnnnntcttgtttatgggtttctttcttcccaagagctcgtgggccttgttagcttaattcagtggttagctgttatgtactggagatttctcagtgggttttactcagggcaggacagacattcatctggctttaagacgtcagtggctctcctctatccccggcccttccctaagatcctgtcccgctggtccgtaccctgagatctcatgttcatgtctcggtggttaagagctgtgcatgggaaaggagccctggtcctctggaaccctgacagttcttgcagctgctgagtcacccctctagcctacatacatttgaaacttttgttttcatagtttaggtgttttggagcttcaccattaccgaagcttctaaaattaagaaaaaataattataaaactggagattattacatttggaatgtcagtcatagtttaaagtatagaatgttcacaataggaattataatttgctagactatagtcagtttgttgctgtattaaggaatatatgaataggcttgtttttacataatagaactttgcattttaaatacttaaactcttacttgtgtacatagacttttttttagatttattttatttatgagtgctctatgtacacctgcactgcagaagagggcatcagatcccattacagatggttgtgagccaccatgtggttgctgggatttgagttcaggacctctagaagaccaggccgtgctcttaaccactgagccatctctccagccccatgaacataggcttttgaacagcagcatttaaactgtagctaaagtgcattagtctgaatctcatcaagtcaaaaaaactgcagcattttgagggaacattgagtataatgaattgagtatagcgaattgaagtcgagatattttgaatgaaaaggactctggtgtgtccgagtggcagaggcatgcagaagccggtttcctgtggctgatggtgagctgtgtgctcatggcggaagggtctctaggggggcacagtattttgtcctgtggagtgttggcaaagcttgttctttcatattgatctctcacaaagagctggtgtggtgcacgtggtcctgggcttgtgatgacactgggtggataggttgcagttcccagcggtgaaagctcttggccttctgtcaactttatagtcagtcagactcagattcactgaacagaaagtgcaagaagaccttgtcccagtttttgaaacatgtgttggtttgcttttaattgtttttataaaacactagccaaaagcaacttggaggaaagggtttatttcagcttatagacttcagtatgccattgaagggaggcagggggcgtggaggaaacacctactggcttgctcttcatggcttgtttaactggcttgttcatagtacccaggaccaccacccacagtgaggtgggtcacataactcatcaaccaggaaaacaccacaggcttggcttcaagcctaatggacagaacactggctcccataggctcgcacatatggcctcattggacgaagtatgtcaccaggggtggtcttacttagccttgtccgcctgcctgtctgcctgccttgtctgtctgcctgcctgagtctacccacctgtctgcctgccttgtctatctgtctccctgcctacgtccacccacctgtctgcctgccttgtctgcctgccttgtctgtctgcctgcctgcctgcctgagtctacccacctgtcctgcttcacatcaggatgtagttccttcctctacttgccctgcatgccactgtgccccgtgctgcgatgatcatggactgttctttgaaagtgtaagcatgccccagttaaactagaagagctggccgtggtcatagtgtctcttcacagcaataaaacagtgactaaggcctgggcattttctcaattgcacttctctattttgtgttgacagaaaatcaccccccttccaaaccccctcagacagggtttcttgtgtagccctgactgtcttggaacttactttgtagatcaagctagccttcaactccgagatctgcctgcctctgcttcgtgagtgctgatacagaaaggtaacctgaaaggtaacctgttcgagtagatggtgctcccttcctggttctctgggtagctaaagggagtgctgtgacctgctgagggctctggtggcccgtctaccctttagagcttgctgcaattctccctttgtgctggtgagggaaggctgtgctcaggaagggaacactattactaaaaagctgcctgagtagttagttagctgttggctgctgggcactgctgcctgttgctgtagttagttagctgttggctgctgggcactgctgcctgttgctgtagttagttagctgttggctgctgggcactgctgcctgttgctgtagttagctgttggctgctgggcactgctgcctgttgctgtagttagttagctgttggctgctgggcactgctgtctgtagctgtagttagttagctgttggctgctgggcactgctgtctgtagctgtagttagttagctgttggctgctgggcactgctgtctgtagctgtagttagttagctgttggctgctgggcattgctgcctgtagctgtagttagttagctgttggctgctgggcactgctgcctgttgctgtagttagttagctgttggctgctgggcactgctgcctatagctagctagcttttgtttttttgtttttgtttttgttttttgagacagggtttctctgtatagccctggctgtcctggaactcattttgtagaccaggctggcctggaactcagaaatccacctgcctctgcctcccaagtgctgggattaaaggcgtgcaccaccacgccccagcgtgttagctagcttttgctacgttttgtgttcttctttcttctaccctttcaatcccgtaacactagagaaacataaaagagaaaagaggatagagaggaaaggaaagagatcccttgacatagttaggttttaaaatggaggggctttatggttcgactacttcctgctgatgggggcttctcgagtttcttggggcaggtttgatctttgctgtcagggtaggtaatttcttctgtttgtttcttctttgagcacatctatttaagaaacttcaaccaacaacctttggggctctagcatttatataccctttgaaaagtctccagaattccaaatgccatctagtcacactatcacagaagctagccacagttggcagaatcacgactcagagcatgaggcaaatcatagtcagctgctgtgggaaatctgaagcagcccatattcccacacctaggattaaaatgaaaacatggtcctgtaatatttctatatttttaaaaaggaaccaagattcccaaatcttcactacagctgaagatatcttacccatatctggacaggacaaggtgtgcctatcagggatctggataggagagaagccagggcttggagccacttcaggaccacaggagccagaaggcaaaatctcttgcagtgttgcctatgtagcatcctccgttgacaacagtgtgccagctgagatgctgaaatatttatagagccagattcattttcccatcgtaggcaaacagggtgacttttgagctgaaaggcaagcaagggtgattggtaaataaggagacagctccttagctccacagctggttcacagctcttcaatttccaggaagtcaggacttgctaggacggcacagtttgcgttcaagaaaggacgtgttctggcccttgtcagttgtaaggccacaagaaccaaccttttgctgttcctccagctctccttagatgccagaacacatgaatagccaggaagccatgaataggctgccagttactgccctggtgtttttattgtctgtctgtgagattgcacctgatttgttgagttacctagtaagtaagtgagtgtgtgtgtgtgtgtgtgtagagagagagagagagagagagaacacgcttgtgtgtgtgttgggggggtgagagagtgatcgagcgtgtgtgcatgcgtatgcatgtgtgtgggggagagggagatattgagcgcttgcatgtgtaagcacatgcacatttgctccaggcaagcgcattctctaagcgacttcccagtcctctgtttcccgttttgaagcagggtctcactgagttgttccccaggtgtctgatgctgcagtcctcctgtttccgtctctccagtaacagacattagaggctttgccactaggcccagctttttattttttattattaacacaactaacgattttacttagtggaaacttttgtatatttaaaatttttcatttttatgaggaaaacaaagttacaattttatgactttaacaagaagttttttcctaatcatatattgtcaaaatagatgaatgttaaatgttcttaaaaaaggaaaacaaagtaaaatttgcagtttttatatttcatttccatctttctaaaaagtgttttacatgtatgtgttggggtgtttgccttcacatctgtgcacttgtgtgtgtgcgcaccacgtgtatacctggtgctcaggacgtcagaagaggggctcagatcccctggaactagtcagtaatgactgaatcacccgacccggtgctggggacagaacttgcatcgtgtgtgagagcaccaagtgtccctaactgctgatccgcagctcagtcctcccccctgctccctcctgtctaccgagtctttggagggagggctgttagaagccagctggggcagcatcgcaaggctccttgctgctggagcactgacagcacgcatgctctcttggtgctggctgctgtttgcttgtttttgataatatgttatcatactgaaaaatatatttgttgggagttgagtatttagctcagtggtagagggttttcctagcaagcacaaggccctgggttcggtcttcagctctgaaaaaattttaaaaaaggacaaaaaaaatatttgttgacaaaaatttcacaaacttttgtcttttttttttgttgttcttgttgtttgagcctggctcttgagtagctcaagcttgcttggaatttaccatttaactgagggggtggggccttgaactcaaagtcctcctgtcttggtctctaatatgctagaattacagtatatcatcatgtttggctagaacaaatacagtcagctgtctttgccattgtcattaaataaatgtcctgctgtcttggctcctgactgtaaccctagcccttgggggccaagttggcaggataaggccaagttccctaaaagagaagcaaaaaaacctgaataggttataaatacctgaacaaccaatggcttgctgtggtatgatgcaggagtgtggtgttatttctactcgtggtggctttatgtgacaagactgggaatttccacagcctgtcaccttttgcctttgttggcagggcacctgcagttatttatgaaaaaggactctcagtgagtccctgttagtcctgcctcatccaccttaccttgaaccaagtgagagcagcttttggatggtgatttcgttgtgcctttccttgtattgcacacagttgcaaaaatagcccagggattaaaacaattccatgcttgcttttaagtgctgttgttaagagtagtgactaagtggtcattgccctgtttgcacacagagagaccaaagggtaagtctctgcttgggaaatctacaccatccacactggtcgaacccacataggaaatctcaaagtgtcacgtcagtgttgttagaaaatgaagggactttacaagagtcaaactgatggtggtttcatgggcatttctcattgtctttcttctgggccccacttttgattgttgccccccttttcacctaagttctgtcagggcaaagagcaggatctctggacacaactggacattgcttgatttttaccccccttgctgtcacttggtgttttgagtaagtttttttaaaagcagtcttcgtcctttcccctgcaggttttcctcagtggacacctgtactttctgcagatttgagcagcagctcagctccagcgctgccacgttctagaactctagcgaggcattcacatgcttcatatctttatttttggtttctgtttctgttttgttgttttatacttccagaccttgctatttcctcagagaagtcagcacatccgggtgaatcttgggaaggagaaatacaagtagaggcgtctttgtctgtcttttgttaagaatgccaggctggggatcagtcagcatgtgccacaggtgactaggaacacagctggatcacccgaagtactggtactgtttctggcagaaacaccctctgcacgcatgtgtttgagcaggctgttggggtgtaccaataggaccatggcagaaaggtcagcagagggaacaagtaccatggtcatacagagtcctggtctgagtttaatccgggtttgctgagaggagaggtttgcagggctgtaagaaggggtgaggcgactcagtaaaggactgttgcctttataagggagcagataggaaggcaatttgaaagcctgtgaactggaaagagcagtgtataaacgcttctttccccttcttttttattttcaagacagtttctctgtgtagccctggctgttctggaactcattctgtagaagaggttggcctcagagatccctcctgcctctgcctcctgagtggtgggattgaaggcctgtgcccccactgcctgccttctcttcctttcttttgagacaacttcttatgtaacttagatagagctattgctatgaagagacatcatgaccaaggcacctcttaaagaatggaaacaattcaattggggctggcttacagtttcaggttcagtccattgtcatggtgggaagcatggcagcatccaggcagtcacagtgctggagaaggagctgagagttctacatcttaatccacaggcagctgaaggagcctggcttccaggcagcctggaggacactaatctgcactagacttagcttgagcatagaacctcaaagcccatccccgcagcgatacacttcctctaccatcatcactccctataggccagaactattcaaactgccacagatggcctccagtcgaagcctctcaggtgcgagggtcgtttctaagctgtccattagtccatgggccagatttgcttttcttacatagagtaagtctctggcgattgaattgtacccaatggaggaccactattttacgtgtgtgtgtgtgtgtgtgtgtatgcaagtttttttatatgtgtgtgtgtgtgtatatatatatatatatatatatatatatatatgaatgaaattatactgtgtccagtattttgtcagacttcgcaggtaaagtttgtttgctgctcgctgtccacagtgctgcatccccaggtagcactgcactccatcttcctaaggccctgttacttctgatcatgtctgtggttgcccatcctctcaaagacaggccgccttagagttcacgttggccttcagcaagtaaccccatcagttaagaagcatgtagttaacaaaacaaaacgtgagtttatcttatcagccaaatgctttaaatgaggctgctgtactctggagagtaatactgacgaagcagctagggaagggaaggacaaggtgctagtgccaagacggaagtgtttggaggatgctcaggatgcagctcaggatgcgaggtccagtgtcatggggtgtccttccctgtcagttctggagtttgtatgaattctctgatgtcattgcctgtaacctcaagttattccttaatgtaaaatgtctgcttggtactttttgtnnnnnnnnnnnnnnnnnnnnnnnnnnnnnnnnnnnnnnnnnnnnnnnnnnnnnnnnnnnnnnnnnnnnnnnnnnnnnnnnnnnnnnnnnnnnnnnnnnnnnnnnnnnnnnnnnnnnnnnnnnnnnnnnnnnnnnnnnnnnnnnnnnnnnnnnnnnnnnnnnnnnnnnnnnnnnnnnnnnnnnnnnnnnnnnnnnnnnnnnnnnnnnnnnnnnnnnnnnnnnnnnnnnnnnnnnnnnnnnnnnnnnnnnnnnnnnnnnnnnnnnnnnnnnnnnnnnnnnnnnnnnnnnnnnnnnnnnnnnnnnnnnnnnnnnnnnnnnnnnnnnnnnnnnnnnnnnnnnnnnnnnnnnnnnnnnnnnnnnnnnnnnnnnnnnnnnnnnnnnnnnnnnnnnnnnnnnnnnnnnnnnnnnnnnnnnnntgtccagttgccatgtttaggagtgactaaaaattctgactgctgttaagggtttggagaggacttccaggttcacatttgaaatggagaaggtggaaacagaactggtgactcagaagccagctggctcatttacataaccatttggcaacctttagaaagggaaggaaggcctggaagctagcccagaaagatctgagtacgaagggccaacctgcaggtatcactcttgtttcttgtaggttgagaatggttatgacaacttcaacttcaataaaggcagaaggttaaataaaccatttgaagacaaatgccaaagagggattataaagtttcttagtatttatataaaaaatgaaatatcaaaaagttgggggctggtgagatggctcagtgggtaagagcacccgactgctcttccgaaggtccagagttcaaatcccagcaaccacatggtggctcacaaccatctgtaatgaaatctgacgccctcttctggtgtgtctgaagacagctacagtgtacttacatgtaataaataaataaatctttaaaaaaaaaaaaaaagttgggtacatatacaagggatttttgtcttccacttagctggtcctaactcttaaaagctgtaaggaatgaagacttgttggagagtggctggttctttgagaaggataacatcacactggacagaagtaccatgcaggctctctaaggagtgctctgtctttaggagtcaaaacgacagattctttttttttttttttttttttttttttttatttattattatatgtaagtacattgtagctgtcttcagacacaccagaagagggagtcagatcttgttacggatggttgtgagccaccatgtggttgctgggatttgaactctggacctttggaagaacagtcgggtgctcttacccactgagccatctcaccagccccaaaacgacagattcttaaaacacatcaagtcttgctcagattagagctgggtggtaggcacctgggtctctggaaacattaaagtgattgtaactaaaagctgctcttcccagatcccagaacatgaactgttcatggcagagtacaggccagtgtttatgggcaattttgtaccagattgccatttccaaggtaagagctggttggtcagcactgtaggtgtctagggaaccctgtgacacaggtgtcgttatttctatcttggagattgagaaggagtgatttgacaggtgggagggcatctttgggaagcggccaagttaacacccccagttcccagcttctgtgtattttttctggtgctcagaattgagcttagtggcctcacccatgttaggtaagtgccccaccaccaagccaccttctctacttgcagttcccagtctccacgcttcttatagtctcagagttcactagcacatttccgttcaggttcatttttagataagtgaggcttttaaaactcattctggccaggcgtggtggcacacgcctttaatcccagcgcttgggaggcagaggtaggtggatttctgagttcgaggccagcctggtctacagagtgagttccaggacagccagggctacacagagaaaccctgtctcaaaaaacaaacaaacataaaaacctcattctggaaacactagtaccattcacagcatggtctttgaaataccatttccgggctggagaagaaggctcagcagttaagggcacttgttgctcttcctggaggtcaaagttcatgtctcagcacccatgtcaggtgtttcacaccatctgtaactcaagctgcaggcaatctgacatcttcttttgacctgtgggctaaagtatacacactgtacccatgtatatacacacaaatttaattaaaaaaaaaaaaagaaaaatgtttcataatgttttagcgttgggaaatggctccatagataattccttgctgtgcaagccatgaggactccactctaacccttctagtccttcattaaaagctgggtgtggtggcattatgtttcagggtctgggtagcagggacagcgggatcctggagcttgttggccagatgtctaaccatccggtgacgtctgtgtttggtgagagagcccatctgaagaagagaatggtaacctgatgtcacctctgtcttctgtacaggtgcacaagggcacacacctgcactgtgcacacgcgggctgtacgctctacacacaaaatagaaaaagtatattttagtttttaagcagttaacatgaaacaccttgctacacagtgggcttttatagtaacttatctgcacatggatggtggcggcggctcatgttcttttatcccatggtggcagaggcaggcataattttgagtttgaggccagcctgctctacagaattccaggacagccagggctacacagagaaaccttgattgaaaaaccaaaaccaaaaatatttaaaaacaaaggaagaagagttctggggctcaccgaagattgtctgctgtgataaatgatgggcgggaggtagttttgatgaaagtgatccagagtctaaataaagatgggcgacaggaagaaagcagcacaggtgagagagagggtggcagagagggtgcaggcagtgttggtctggcccaggccctgacaaagggacgctgtcaacatctgtgggtgcctgcgggcgccagcgggctcagtgaaccagcaggcttgtccgcttgcacccgatgtttcctagtgagaaggagctgtgttcctttgtggggtgtgctaacccttgggcactgttgttagttactgttgtgactctaggaagccccttaggcatagttgtgggtatttctcgtggtccagggaagagcatggtttgggtctggcctgggtgactgtgatgtgtgcccaggtttggggggaggggggttaggagatgcctttcctgctctgtgctagaagcgagcatactgaagagcagcacagccctgtgctcgagacacaatccggttccaggattctgtcagcaaataagctccggtagaacacggcggtgctttgatgcggggatgctgtcccacctaactaatcagagcgtttaaggaaatgcaacggtagagattgagcttttctgtttgctttatttatttttttactatggtactaatgtttcagtttttagagtatggtgtgaaatccgtttgctttcaacattatcgcattctaggattctgttgataatggtaaatattttgacttgggttgctgagggtggcaagaggagctgggtggtgatgaacgactagaactgtgtcagtgtgctgaggacagtgctcattagctgtcagaaggtcacaggaagagtgactgggtggttttagtgcagactgcatgcatactgtgccgtaagtggtttaattgcctaaaaccgtcactcaaagctcccacaagccacagttaaggagaatagtatttgtggcagataacatttaagacacagcccttctcgtttgtacagtgtccctggtgtcgcaaagcagcttcattcagcaacagataacctctccactggggccctgttgagaggcctggagagaagcagagcgctgcaatttgtaaaagtcctgggaagaacttccttcagctagataactaaaaagagattggttgcacatcgtgctggattctctgtgggccggggagccctccagcacagccagaatgtaagggtttgcctaggtgccttgtgtgctggtgcaggcttgtaatgccagcacttgaaacagttgtcctgagtttgagacccactggtgagtccctgccttttaaacagagttttatatctaaaaggaaggctcagttaacactttactaagtcatttccccagcacatcatataaacaataatgaatggggccaggtctggtggtgtatacctttaatcccagtacttgggaggcagagggagcccagatctttgtgagttcaaggtcagtttgagtgttggaattaaagctagtggtattgaatttcaacagcagatttttagggtcttaaaaaaaattctttcatctaagtttaatgatactttatttttgctaaaactccgttagtgtgactctcgctgtagttgctataatctgtttcatagttcatttttaagtgtttgtttgcatgcatggtgtatgcatatatatggtcataagaagtcagaggaagcttttgttttgttttgtttctgtgtagccctgcctgtcctggaactcactctgtagaccaggctggcctcgaactcagaaatccacctgcctctgcctcccaagtgctgggattaaaggcgagtgccaccactgcctggctagtcagaggaaactttatggacttagtcctgcccttttacctgtgtatggtttctgggaatggaacccagcctgacaggcttgcaagcaagcatcttccccactgcagctatgatggtctttaaaacaatcactaaactcactcttcaggcaaaactgtgtacagattgcacattttaaaatccataaagtcaggctggagagggcacagtggttaagagcactgactgctcttccagaggtcctgagttcagttcccagcaaccacacagtggctcacaaccatctgtaatggaatctgatgccctcttctggtgtgtctgaaaacagctacagtgtattcatacacagaaaataaataaatttttaaaaaaattcataaagtttctcagaaagtcattaaagttagtgaccttggcatgtcttgaaacacaaggtggttaatcgggaaaccttccgtagaacactcagtggcctttccgttgggttgggaagtgtagctagtggacttctgctctctgcctctgcagtcagccctcaggctgctgccgtggatttgcagttagtccatagctaagcaggtaatcagcttctgcagatatatataggcctctctttgctgcggtgtggggcgcactgcatgtggggaggccagaggttgtctgtggagttgcttctgaagggcggaaacgagcttcccaaggctgaacgttcagagccatgttgccgtccttcgttaagttagttagttagttactctttggtgtttgaagctgtgagttctttatattgtggcctgttagtcccttcttagattttctccagtgctgtgggctggactcccacagggtcactgcttcctctgtgtgcagaggccttctcctcagtgctcttgggccttgctgttacttttggagcagtgacggccattttcagaaagtttgctctgtactaatgttttaaggtggctttgtcccctagtagtttcagagtagcagagttttggcgtttggcccagctttgatttagcttttaggcatggcacgagatagagaggtagatgggcgtcttcatctatttttgagtaggtgcacggttggcagtgggcctgctccaaggctgcgtggctcctcactgcgcagcactgacactgcaggctggcacatttctgcttcagtcagcactggctttgaaaacactgccccttcctcgtggaatggtctgggtgccctttccagattgtttgcccgtggatttggttttttctgggcgcctcacttcagcctctgtcagtgggcttgttattatagcagcactactctgattaagtttttgtaaatctgtgataatatttcaagcggaggagtgacttcccagcttagttcttttaatggctctttttgctgtttagagtccttggaggccataccagcactcagatgagccttctgtttctagagagcctgtcattgggttttgatggcaaatgtgctgagcctaggctagcatcgaggtctgattataggtagcattttctgttttccgtagcaacctttatagttttatttgtgagtctttcgctgtttgagtttggtcatcacttcggaatcttatctttataaatactttgtaaacaaaacttcctatttttctcttcagatacttggatctccacattggttttgtatgttgactttgtatcctactttattgaaatcttagttctgatattttgtgtgccgtctctgtgtgtgggagtgggttacagggagatgccctgggtggtcctttatcccgtctgtctatgttggccaccaaactcagggttttgtaataaactgaaagtgcagagatgtagccacagcctttccaaggttttctgcatcactgggaagatacatttatgttgccttgtttttctgtgagatttacaaaatgtccctttctcttctgtttgctgggtcctccgctagctatctgggggcctgattcttctctctcctgatcttcaggaaaagtgcttggacttttccagtgagtgtgatgtgtgttgtgtttgggtgtggcttgtagtgtgctgaggtgatttctagtcctgttcccgagcttttcaattgaatgtgagaatgtgtggtcctttgtgaagggttttggtctgagtcagtttgtgcacccaagtgcaggtcctgctcaggccggaagagggagggatcaggtcccctggagccaccatatccgggagttggggactgaattcaagtcctctgaaaaagagtagtggctctccagccctgtcattttttacacagtggattgattttgtgcactgtattttaagcttcaccaccactacatgggattatttctggaatacgggaatgactcaatattgaaaactgatcatggcagcatgtcccacgagcataaagagtgacagacagtgatcagttcagctgacacagaaacacttccaagcgcccagtgccctgttctgacaggaacactcagttaactcagagtagaaggaaactacctcaacagagttgaagcctcatttggaagatccacagtgagtgtctcccttaatgatgaacctgtactgtcaggttgtatcaacttgacacaagcttgagtcatcagaggaggaggagtctccttgaggaaatgccaccatgagattcagctgtagggcattttctcagttagtgatcagtgggggagggcccagccttttgtgggtggtgccatccctgggctggtggtcctgggttctgtaagaaagcaggctgagccatccacgaggatgcagggcagtaaggagtgcccctccttggcccttgtatcagctcctgactccaggatcctgccctgagttcctgtcctggcttccttcgatggtaatgccagggaagtgtaagccgaattaaccctttcctcccaacttgcttgttggtcttggtgtttcaccacagcagtagaatccctaattaagcagctaaagagtaggaataggatgtctacagtcacctcagattttatctcttaaaaaataattcatagataggatgtctacagtcacctcagattttatctcttaaaaaataattcatagactgggtggtgacaattgtctttagtcccagcactgaagagctagaaacaagcaggcagatctcagtgagtccaaggcccttcgagtctatttactgagttccaggagagctacagaaagaaactgtgcctcagaaaagaaaaccaaaacaaacaaaattcatagagatttttgtttcattaaagtagccgtgtacccaacaggaaataaactcaatagtcaaggaatgtatgccctgttctttgacattgcctgtctttctacttcatcataatgttttttttaacttttttaaaaaagatttatttattatatgtaagtacaatgtagctgtcttcagacactccagaagagtgcatcagatttcgttacagatggttgtgagatgccatgtggttgctgggatttgaatcaggacctttggaagagcagtcagtgctcttaacccctgagccatttctccagtccctcatcgtaatgttttaatgaatgtatgtgcttgtcccgcagcctgtgtctggagggcagaggacagtttgtagggatcagtattgtccagtgtccaactgccttgccacctcatcttacttttcttttgcctaagtgacaacccctccccttctccctccccaatgtatagatatttggtcttgatttaaagtgatgttttctctcctaaaaaggactggttttgtgtctctgattaattagcttactctggttgacttgtctctgtatggttcctactacctagttcttatgtttttttttttttatagttacagtttagtgtaatatgaatgaatgtattctttacacttaaaaatccagctcagagaaggtgtctattaaagactcaagcaagaataaatgtgtgttctggagaaacaaactaatgtgtctggacagaggcccctagggggacagtctgcagggtcctgggctgtattcttggccattctgtcccgtgctcccttcccgagtggtagagcgtgttggagcgtgtttgctgtcctgctgctttcatactttggtcttagcttgtgatgcatgagtgtgtagggggtttttttgttttgttttttgttttttgttttttttagtttttgtttttatttttttttttttccaagacagggtttctctgtgtagccctggctgtcctggaactcactttgtagaccatgctggcctcgaactcagaaatttccctgcctctgcctcccaagtactgtgattaaaggcgtgcgccaccactgactggccatgagtgtgtttatatgtgtgcactcacacagttgtgggcgtcagttctctccttccaccgtgggttctggagacccaggttgtcagcaagcacctttgcctgttcacccatcttgccttctagttctccttagtatactatttatcctcttcacctttgtccaggttccctgcaggtaccacacatgagcctttctttagctgagtcttactgctttaacacatctgaggacagcactgcttcgttgagctttttctgttttaggattttagtctggccctaaaaccttgttcttctacctcacatcattctgactgtggagtgtcctgtccagttcctgccctgtgcaccccaccctccctccacctctgttggttccagcctaggtggcttgctctcctgtgtcaggactgtgctccatgatgctctttgttgtgtgtccccaagacgctgctctcctttccctgatgactggcaggaaggtcattgcttgctaagtagtcactgttggacctgcctggaaacctccagtgacgttctcgcctttggacattcttgctacttctccacatagccccctccacagtcggctttttctaggtgtttcgtgacttgtgaatcagttgtgccgctgatacaccctttccttctgtctcactgctctcaacaaccaatcagaattctatacactgctggattgcttctcttactctgacctgaggaagaagactttgggaaccaaatactgactactggtgatggaatgagcatcttcatgggaaagggaagcagctttgctctagagcagtgccttagggatgcgtttgttgtgtgcagatgtacaggcctggttcttgcctccctggtggatagggtgtggccatgttgagtattgccagcctggcaggctgctagtttctgtatcactaaggacttgatgaataggttaggatggggcagagccctgatgttcttaagctggtctctatcatacacatcaaaatgggtgtcattttgggcatcgtaggaaactgacttggtggtgggaatggggaaagcagcagaaagttatggtatggtagttgtggagagccaggggtgggtgactcagctcttctctgggcctgctcatgtgatgtctgtttatcctcagggtgagttctctaggagtcgcattacacaggaggcaatgttgacttagcctgctcatccatggtctaaatataacttgtgtgggtattgttttgtttttatattttgtttagttttgcaagatggaagtcatattggagacttattgagtgctttcctttctaaatgattgtatcttcctcctatacactctggctctactgttagtattgtggtgggatatttaaatacaaagagcagtggaagatagcggtcggtcgtattctctaaaggcaattcgggaggtaccttgtcatgtgttttctactcatggccttttattgcaatcactggtgcaaccttgtggagaagtgcacgtacgttgttctgactgtccttgctactgagtcctgtgagtctcgggttctcccctgtgcagagaatttctgagccatgcgctgagtgtttagcgtgtccaccatgatcacaacgcctttgagggcaggagctctgagcagcccgagttcataatcacacttgcatattcgtctgggaaacagggagtctttgtcgtggttgacacttctttttgacacttgggtgcccctgctctcggaggttcagcacaagtgcccccctaacctgagccctgtatcatcctgaagggcagagggtgcctggattccttaagaaggaagcgcagtgtcctggctgcctggcgcttggctgcctgtgcttgactgcttgcttccaccacgcacagtgcctggtgctgatgagaagacaacacaccaagaactgcgcgcttgcatttccagagttgttgttgtcctacttagaggcaggaggcgctttatgtgcccgtgcctggcctggaactcactacgtaccccaggctggccttggattcacagagatctacctgcttttgcctccttagatctgggattagaggtgtgtgtcactacacccagttcatttcctgttttagaagatggttagtcaaagctgaggagctgtgtcccagcatcacatggttagactacccgctgtgacttctgtggcagcactttctagttaatgcagtccttaggagtttcgtgctagcctagaatggcatttttattgcatgtcttgggattgatttcacataagtgggacctgacttggaccccatttgaaaggtgcctctggtttagatgtggtcccttatatactcctttcttaatcaatggatcacatattggtcctattggattattcaaatatctgaccctggggaaataagatggcggctcagtagataatgtgcttgctgccaagcctgatatcttatgctcacacccacatggtagacggaacgctgacagccacagtttacctctgacttcctgcgtgctgtgatgtacacaggggcacacatgtaatacatacaaagttttttaaaggttctaaaaaaatgtctaaggttcaacattgtgcccacacacacaaatacacacacacacacacatattttaagattaactatctcaccagacatgggcgtgcacatgtttaatccctgtactcagaggcagaggcaggtgaatctctctaaatttgaagccagcctggtgagttccaggatagcccgggctgcatggtgatatccccgactcaaaaccaaaaccaaaccaaaacaaacacttaagaactgtagaacgttccatttgagcttggtgaaaatgtgaattttgtctgtagcctgcatccctagaaacgcattttcaggtcaaggagttgagtgctgtgaaggctgggtgttacccagcagcccttacaagtcagcagtgcactgtccagtcctactgtgagcgttctcatgcacaacgtattgggcttcgtccacttggtattatttacttaaggtgataaattgccttaaaatgagaaatgatgttttatttccaagttacatttgaagtgcagcgggtgctctctgagtgctttctgtcatcgttggttttgtcacctacatttgttgttttcattataaaagtagaaaatccaagccgggcaatggtggcgcacgcctttgattgaagcacttaggaggccgaggcaggtggatctctgagtttgaggccagcctgggctatacagagagactgtttcaggggagggagtagaaatccatcttagtcccttgtgtgggttccatgggtctgtgtctgaagttattgtaactcatatgcagttcccctcttctcatctgtcagtggaattcaccccaaaaccttagattctgtttgtcaaaatcttaattaccacacttaaaagttctgtgtaagtgactgaggacttgtgtggtcggcctgtcttcagcttgcacttggttagcagttatctaggcgagcaccagagttgagtgaaacgtgaagctcaggaaagtctgagcagtcctctgtaaggacaggactagggtccctggccacaggaaatacgtctgcgcagcccgtcttggaggatggagtcattgttatggttctgatgtgtagcacctcctcttttctgtacgatagcgccaggtactaagtctgagggccttgtaggtgctaggcagttgttctgaccaccacatgtacgcagtgacacaggaccacatttgggaggagactcagaccctacagtaatgaaacctgattgaaaaatcaaaaggatgttttggagatggcgtgagaggtctggtggtgaagagcaggtattactcttgcatggcatccaaggttcagtgcccaggacccatactgggtggtgtaccacgtccataactctagctccagggactccaacaccctctctagactctgcagttaccagactcacacaagcatataccacacacgggcacatcctcacacagtgaacataaaaagactattgaaaagggcgcgctgaagaacctggattaatcatcccagggaggacgtgaataaacaagggttacagaggcttcctctcctgcttctgctcagagcacagcaggtgcccagggagacacatgtgggcagagttcctttaccctgcgccattgacaaacaccaccatgttactgagggtgcagtaccttatgttgaaacagaacagttgtgcgcctgttccagacattgctttgtatatgggtgtatgcctgtaccagacttgtgtgtgtgtgtgtgtgtgtgtgtgtgtgtgtgtgcgcgcgcacgcgtgtgcctgcctttactagctcttatgcatgcagctgtttgtctctgtgtgcctacaccaggtccttgatctctgtgtgtttgtgtgctttgtgtttatgtgcctgcaccgtgctttccacttacacaaagctgccgtgggtgcagtaggaattggttctttacatgcattcagtgtaaatatttaataaggagaagcatttgggttttttaaaagatatgtttagagaagaagcctaagctacaggaaaataaaatcgttattttattttggttgttgtcataagaagtatgtggtgctgtgacagggactggtggctggtaccaccaggaaattacgctgagatgtacccctaggaaattacgctgtgcaatggagggagccaagtggatatggagatgggcagatagacagaacagagaggacactaagagaaagagctggggtggcctgcagtcctttttatcaaccacatatacctggcacacctggtggtgctggcaggtgacatgaaaagcacattaaaaacaacatagacaggacagttcctttggctagccatgtgacattactactgaataaaaaaacgcctcgggcccgaatgctaattaatgttcttctcttccgttggctttgtgtggtctttgttggccactgtgttgaagacattattaaaattttgactggtcagtctctgtggctgtcaatatctttccagcatggtccatgaaaaggcagtgggcttcttttctgttgtggcccagcaggtgtgagagcagtgtgctggcagagtgtgatgccgaacaggaaggtctagtgcttacacatggcatctgcggcttgagacagcctttgctgtttgtccaggctgccctcaaacttgcatctgttttccctctaccctctgtgcgggatttaaggtctcactaccaggccggatttgatactatagttcaaacgtgtgaagagacatttgttatcagtattagccaaagttgatatccacatgtatttttaaaaagttgatatagtcaagccattcagtgtggtcataaaaaagaatttttggtaagataaaaagtaaacctgaatcagtttgttcagttattaactacttaatattcatgactgggtaactgccccgttgttcagtttgtagctagacttaatagaatttgaataaggaaagaacttaaggtgattctcggccttctgtctcttgtggaacttgctcgggagatggcagctgtgttggagcattcattgcccaacaccctcgggcctccactcaccacccccccaaaacatgcgcacatgcacgcatgcgcttgcgcacacacatgcatgaggttgatgaagttccaccaggccctttgcactcctcatctgatataactgtatctagatttgggttgctgatagctctgtcagtgggcatacactacttctgcctttagttgctgaaaactatgataaagttaaaacgttaaaacttgctacagaccacagtgcataccacttctgcaaacttaaaagtattggatttgagttgctgtgtcatttttttaaaaatatgctgttgttttgccattctctgacagaccccttatccctctggacagaatgcaggtccagccacattggtctatcctcaagcccctcagacaatgaactcacaacctcaggcccggtctccggtaagtaagcagaggtgggtctcgcctctgcacggctgctgtgatcttttagtgaatgctcactttgttctagggaagatttagcatcaccatcactgccaccacactgtccctgctgtgactggttagcatttgcattgcagcaacttagatccagggctcatgtccatttctgagggaagagaaggtagagctgttccacgcacttccttccacacagtctggcactttcagaacttcctcctttaagttcttagcattttacttgtaccgctgggaattcagaaaagtaaatgacggtgagtgctgtgggaagaagggtttctcaaccaggtcaccagacggctctaaccattcgacagtatggtcacgtgcatgatgtccacccaggcgtgttcatctcttctgtggtaaatgaattgccatacagatgtgagtgcagtcatccttgctcaccctcatgtggattgcaacacgtctaagacgggctccaggccatcctcctgtctcacagtacacagtggcttctgctctccaagcctgagcgtcgtctccttccctgcatgtgtagctctgggcagaaggtgtctctaacatctcatcgcacctcacgtccctccttgtacttgagctctgtggagtcttggaatacaggatcttctttttgcacccgaccctgcttttttgcttgtagcacaggaaggtcattgcactagctcctgctcatttgatttcatgcatgaagtttgaattgttgaaatgttccagagacttgcttaaagagctaggagagtctaggctgcacagagtggcctgtctttctcacctcttcctgccttcctttccctcggtgccttcttctccagcatcctgttcttagatcctggttccccgcagttgtcggaggagccatttgtagatttgtgggactttagacattgttgcctgtttgcttgtctcctgttttgctgaaacggtgaacccccaatgtctggtgcaagttttgttctaagagtggtttgggaatgtggacacttggcttttagagagggcctgagaacacggcagaaccacttacatagccccctcccccatcctaattgttaagtatagatgtcatggtaagctcttactgtagagaactctgtggccctctcccctaccccatttaaatgatggggaaaaacagtcagagagaaatgacatggttagagcttggcgcaaaacctgactgaagagctgcatctctaaaccagttttctcgacagcccggcagaacagtgccaatacattgcacagacacctggaagaggaggaaggttttggaacagagccccgtttacaggtccttggctggaagaggctggataaaatactacattgtaagcaatataacaaactgtacttcttgcaggcggcagtgcctccggcacacattatttctgaccacatctacatattggctgatgaacggaagtgcattgattgcttcttgcctggaagttcagcctggcatgctagctcctgccaggcaccgtgggaaaacctgtacaaattgggtgggtcatctattgggaattagacaggaataatcgggctttaccttattccccctgttttaagtgtgaagtggaatgtcccgttcagattctaatctaaaagatgaattgggaggcttcttgcctaccctttccagtttataattgattatcaaggggacaattatctgtagttatcagccattttcccccttgtggtcataaactcctcagctactatcctgtttgcagtttttttgcatctctttggtagtgaccattaccacccacattactaaaacccacacatggcacattccattccatgcccaaagcaagggcaagactagcagcgcctcggctactcttgcttattgttctgggtctaatagcttttgttttgtttgtgttggagccgggagggtagacttgggtgtgaagcttggcgggatttcattttctgttcccatcccaagctgccatgtcattgtcctccatcctccagctgcgggaactggcaaggagaggtgtgggactgcgcagaggggcctgcagcttattcaacagtggcaaactaattccattctgtttctgctgtaacaggccattggccatgcatagggtagcctttctccgagcatctgctttttcagtcctactggcttcaagtcccccttcccgctccagtgtcccttctgtctgtatttctagttgctccccactcgcagcgttagattgaggatgcagaggcccttgcttctccctgttgaaaatgctgactcgcttcccgtctgctgctttctcttgatggagctcttcatactgcagtttgtctttaaatgggctgagaaaaacagtgaagctattgcagtctaatttggaataggaacaatttggcttttgtagtaatctgtaactgttccattggccatactcagttaccaactgtgcacagcagggaaggccgtggtgggtggcagtaaccctgggtctgctcagctcactagctgctttccttcataggtacaacctcaccatctctaaaaaaagttaaaagaaaaagtttctattttaacacgggccagcagtgactacagtttgttctgttgcttacagccatccatagggtcagactgactctaaaagacagccctacagccctcgggaccaatgcagagcagtccagggatcttccagggccttcaaactgacgcagttatggttttcttcttaatctatgtacacttttgtaagacatgtctcttgactggaactttgcggttgtctgaagttggactcttgaagttagaaccttggaaatggcgcctttctgcagagtggcgatgagacgggcttcccgtgccgctgtgtttgaagtggccctctgacagttttcttcacatgtatcaccagagatctctcctgctaccctctactttcatggcatccggatggttttgcctaatcttgaaacttgacgtccatagtggagaaactaactgctctgttctcaaaaatgaacaacgaaaaattcaaagccttagtttctgtaaagaggagagattctagaggactcactcctcgctgccaccttctgtcgtctgaaaagccaatttaccagatttggtggcttttctcacaggctatgagcaagcccagatcattaaagcactcttgtaaatacttgatgaccttgtagcctctgaggtaggctttcttgtcagaaatgcgtgttgagtgggctcccaccctggggcggcgtggcgtggtccacaggactgctggacattttcagtccagcgtagcacagtagggtgagttacacactggatgttcctcttgttggtgaatgaagtgctaagtggagaagagtggctcgcactctcacaatccggcttcctctggggttataaaggcacaggggctgccatgacagaggtttgcttcttgcttaactccgatgttctcactgctaaaggagggggagggggttacctccaggtggctgtgtatgctgtatttcctctgttttctgtagttaaaattattattgggggccagcttttgctctgataaattatatagttccagagggtttttttgttttgttttgttttgtttttgtgtgttgtttttgaagtctgagaaattgtcctgagaggtgaagtagaagtgcatgccacctgctggaacccacagaaggctcagcttcccttctctcctgccctgggaggggctgaggggtgtgggtaagccccccctcagcagggctgccagggtttgctcctcgttgcaaatagagttaaaaattaactcttaaaatctttcccattaccctccatcttaaaaggatgctattttgactggtcatggtggagaccactgttctttactggctgtttgctttaacacacctagtatgcaggtttattagttaagtgcatttacacacacacacacacacacaaacacacacaccccaaacctgtgtgttagacacccatctaatttacggaaaacttgagtctgatttgatgggcattccctgtggatacaagtctctgccatgcttttatagtgtaaccacttctggtgccctccaggcgcacactttcatacagtatatttgatttccatgtttgttttaatacagtcaaccacctagtgtttcagactccctttacagcagggttttttgtttgtttgtttttctctttttaaaaaaggctttatttattcatgctgttctcatgagagaacacccgggtgctaatagctcaacagccttttcccagcttctgagtgccagggtgcctgggcggtggtgtcaactgttgggtcttggtgcctgtctgtcactgtcctacagcagagccttactgttctgtgtctttatttttttctcgtgtgggttgttatcctttagtttgttgtatactgtaacgttggtttctgttgcgtttctgactctttgtgcccttccttttgtgtctgttcccttctcctctcagtttgcagcggggcctcgacctgcccatcatcaggtactgtactcttgtccctcacggtcaccctgactaacataacatgtggggcttagtagctgctgacccttagaatgctgccccgctatgtgaccacccagtgacttcccagagcagcctctgtctggcaggttggcttggctttacttcttgttagtttcactgtattttgtttttaataagcccatttgccagagcaaacttaaaacattttttctttccttgaaatgatactttgaatttacataattttgaaatgttaggtatattaattcttcgtgaattttattaataaacttaatgtgatggagcaggcaccattctaagggttgttgttaacattctcctgtaactgatactgatacataggatagcgttcctcttgccaaagaattactaacttagacctcataacaaattaacaatgaggtgcattcatttgctatatagaactcttcatatagcttacttaatctgaatgtgttaacttattattctataaggcattacagaaaataatctttaaaaagtcagacacaagctgtgcatttgcagatttgtactaaaggtgatctgatgtggggaacaaggctctgcttgccgccttgtccccaggctaacacttccctgcgtgtctgagacattttctctgtggtggagtaggaagagccaaggttaatattaggcttcatatttaccaggcctactgcatgcgaccatctgcatgagcagctctctttctgagcctcagttccctgcagtgtaaacagatgcaacaggaacgtgcaggcacacagcatccgacacagtgtgggcagtcacttggtgctcttaatgatgcttctaatcaacatagtactgttgagagacgtgaggcggactgtcccttcctgcgtttgcccgggatgctctgtccaggatttctattacacattgtgtgctgcctcacttgaagtcttccgttatacagagtgatttgatacaaagctccatttcttaagatgtagtcttaacaatttggaggagacggggccaccaaattctgagatattttaagcatgggtatggcatggatgttattctttgtttttttttttctatcttgggatgggtggcggggttattcacttatttcagtttgctgatacactactacaaagactttggggtgttggcactaggcagacgtgagcttcagtcccccttattaactgagggttctggataagttactcactgggctcagcttcagtttttcatctctaaaatgggattgataatgatgcctcaaaggaatactatgaagaatatgaagataatggacaggaagcggtcagcaggatgtatctgaacatgtgcgtgctactacttacaaatgtaattcctttaagattcatataattaatacaattgttcttagattcatttagtatatatagatgttttacctacatatatggctacactgcatgagcactgttgctcttggaggccagaagagggcattggatcccctctggaacgggataactgatggctctgagccaccaggtggacactgggaatcaatcctgagacctctgcttagccactgagccatgtgctcagctccagaattaatataagttttaagaatttattcaactctgcagagacaaaggttttattttatcaaggtgaaaccaaattctgctaagagagaaacaaggacacctgatccaggagcagaaccagcaagggtggtttgtgggttagctggtgaaggaggcgcctcctgactcctgtaagtctccaccctcacctttgtctgcccaccctcccttcctccctccctcctttctaaagatttattttatttatatgagtacactatagctatcttcagacacaccagaagagggcatcagatcccattacagatggttgtgagccaccatgtgtttgctgggaattgaactcaagacctctggaagaacagtctttgctcttaacccctgagccatctctccagccccaacctttgtgtttcttaagcattggtttttctcagggaagactgccagtagcagtaattagattgcctttggccgctctcctcctctggtggtagaggtacagattacacatgaaagggtgattctgaaactgaaacagtggcactgtcttggcctcactcactagagtgacaaacaaggtggtttactctaaaacaggtttctgctctcccacgagtggatcagaaactgaaaggctttgtgtttgtgattgctgggatgtgctgcagtggccttgaggtttgaatactgcattaagcactctaaaggcttgctctgagcagtcctttcctaagctttctcttaggtatgtgatttactttcaaaaagtgctgggatgtaagattggcttgagtggccatgccccttatataaaatacatctcagggaggtggttggcctttcttcctcttctaataatgcttatcttacaatacagccttttttgattgttttcagttctcaaagaataagctaaaaatatatttacaagccaagtaatccattaaagcatcctactcctaaatagagaggtgtaagtgtgtgttgcattccttagcacaaaaggtctttgcttgctttggtaggatgtgtcatgcagcttacagcagctgagggtgttgctctttaagttatcccttgtggatgtgtgtgctaccgtgcacatatgaatcctgaggacacttttatatggagtctgtttctccttccacagaggtggctcaaactacctatatttgagggatcaaattcagggcctcaggctcttcctcaccgcaagcactactgctgagccagctccctagcccagaacttgaacaactactacttctacttctacttctacttctacttctacttctacttctacttctacttctacttctacttctacttctacttctacttctacttctacttctactactactactactacttctactacttctactacttctactacttctactacttctactacttctactactactactactactactactactacttcttcttctcctgctcctcctcctcctccttcttcgatttttttttaaatttactttatatacatgtagctgtacagatggttgtaagccttcatgcagttgttgggaattgaaatcaggacctctgctctctctggtcgaccccacttgctctggaccaaagatttattattatacactgtagttgtcttcagacacaccagcagagggcatcagatctcattacagatggttgtgagccaccatgtggttgctgggatttgaactcagaacctttggaagagcagtcagtgctcttacccgctgagccatctctccagccctgacttgtcatcttgatcctgttacgttttgtaaagagatgtacattagagaatattccctatgagtgtgtgacaagtatgatcgtggcttagtaagtgtttcagcagacatggacagcaatgagtgagttgtcatttgggaactatttgaagggatccttgtgaaaggaaaaccctgctctgtgtagtgagaaactactttttttcctgtgtaaaatggagttatgtaattaaatactgaatattttatttgttctcaatagagccgagaacctgctgttgaatcagcttcttagatttgtgtttgtttacaagatgtttagctgtatctggcacactgagggagctttacagccctgtcaggggagccccgctcaattgaggtatccagcagccgcgtgcatggcgtgtgcatgctgttgggtcttggcataggcagactgctttttgtctcgatttttgtagcctgtcattttgtaactgcagaacttttagcatcaacacttttcttccaagagaggagatgtatgctgggacactgtagaaagctgttagttttccgtccttcttacttgaaaatcccagggtggctagaagctaagagagcaggatggcctcagtgggcagagtctgctaggtgcgctgtaacccggcctgaggtagtgctttgtattgaattattgaaattgctgtagttgccatttgcagttccctgtggtgctatccttatcttgatttgggggttcacagtgagatcaagtgttagctttttatagtttgcatttttttttttctggtaaaagacatagtctcattgtatagccttccctggtctgccactcactgtctagacaagctggactcagacttgcaggtactcacccatttctacattctgagtgctgagagtaaaggcatacatcaccatgcccgccccacgtgtaccctgatgaagagagaaaaccaggaagttggtatctccccgtgttcacagagaagcctctgcagttggtcatgtgtgatattgacaaatgctgagtgtgtgatattgacacatgctgagtgaaatgctgtgttcccaatggttggctcttagtgtgagttggggccggcactggggaggaattctgaaatgtgtgcattcctgttggtttattttgccagaagataaatctaagccagttggcttgtgatttttttttttttctattcacaggcttgaaggtttttctactagaaagtgtacttttaagataaaggctttaaacctgcctctgatgcaacagctagggcacagcagagtttaggagagtgactaggacagtagaacaggtatgggagataggtcccaggggcagtggggagggagggagagtggccagcgccacctttccagcatcctctggttagcctcactaccaactgtcctgggcgtttgcttgcttacctataacatgggtaagatatgcttgtaaatgacctacaagtatgataatagcatcgtagattttctctgtgggagtttgaggtataaagtatttggcatataataaaggtctctggttcctcctccgtcccgtgtgtgcatgcatgcatgtgtacatgaacacacacatgcttaagccataggtgtatagtggccacaagagagtatcggctcctccctggggctggagggatccctggaagatcagtaagtgctcctgactattgaatcatctgtccagtcccttcctaagcgattttaaagctaggaatgacgtgttcttagaggctgttcaccctagactcttcctcctgacagaacacttggggtccattctcttctccctgaggcagcccttggtggcagcactgttaataaataggactttctgtggtgatgggtgtttccgctgtacacctttcactactgtgtgaagtgtgtgtagtgtgcagtagctcctgactgcatctgctattgatcacttgaaatgcagtggcaatcagttgtatcagtgagagtttgattgctgtgaagagacgccatgactgggcaactcttataaacaaaaatatttaattggggctggcttatagtttcagaggtttagtccattatcatcatggcaggaagcatggcagcacgaaggcagacatggtgctggagaaggagctgagagttctgcatcttgatctgcaggtatcagaaggagactgtgtgccacactgtgtagcttgagcattggagaccttaaagcccactcccacagtgacactagtgactccaagaaggctgtccttattggtgccactccctatggaccaagtattcacacacgattccgggagtggagggtgacgtttctgtttaaaccaccacagcagttttcagataactttgtgaattgtcagttacacagaagggttagatctaactgtggatgttagggaaagatggcgaatgaggggagggatgctgcagactgagtactttggagacagttatgtgtttcactgcctaagtttcttatatttgtcctaataaatggtagcttactgccatgcccactcacctgaaaaatagcctgtatttcttgcatcactattaaatagaattgattgaacggttaggaaagagtattaacaaaccaaccaaccaacctcagcttctgccttgtgtttcctgctgacacagcttttctagtcctatacagatgtgaatgtgttgtgtgtgtgcatgctttcatgtgtgtgtgcatgctttcatgtgtgtgtgcatgattgttgtgtgtgtgtgtgattgtgttatgtgtgtatgtatgtgtgtgtctgtctgtctgcctagacaagaggacagataggctccagatatccttcctctgtaaggaacagtttgagtaggtctttcagatggcatggcaagcatgttcatgcatgtcaacatgcctctttcttgaaaaggcatagttggtctcgagtttagaagatatcttcttgactaggagacagaaattttgtgaaggaatcaatgcctcctttctcttagtagggttagttatgattacagatgtctatatgttagtgtgctggataaaggttccactaagtcccctctgactttgaaatgaatagatttcttgtggttggttgctttctatctcataagaggtactatctgctaaagccaacagtccagacctagagcctaacgcagcagatgaggagcccccagccttctaactctgatcctctgttgggatctgtggcagcagcagcagcagcagcagcagcagcaaatgccttagagaggagctgagagcatgaattagtgttacacagacactttgggccacggctggtagcttcttaatgctggaaagagctcatctgtcacttaatttatccatgtcaatggattttacacagttcaatgttgaaataataaaaatgtcttctatcagcgtagctacacatttgtgctgtgtcagcttggcttggctcatatcagcagtttgattagaaacacttgggttcgacatgcctgaaggaaatacactattcagaaacgcttgtgaataaggtagtcagttttcttgtgcaagcttgttaaggatcgcatcagagtagctgagatatcggtcaggaaagcgcttgtgtgtaggatgtaggagaccttgccctgtgtgttttccgtgtacttgtatgtgagctaagcagtttcttgtcttgtcttctcctctcctttgctaccccataacacgactcttcatgggggtgggagttagtgtataatgtcagatgatgagctagcaaaggagatagcccatctgtgggtttgtggctcttcttgttgatttcgtctagagttgatggaaagtgatctacctcatggcacaagcctctccgtccttccacatcttacagtgttcatggtgagcgtgcgacagtgaccccttcttaaagccagcgagatctccgtacctcctgatgtattgtcagtggagtagaagtgctgacgtttgttctaaaactgtgtttacaaaacagacttatgtaagtgggaatgtgtctgttggtcatggaatggagtgtcaccatttcagccttcctgattgcagccgattcaaatggtgtctgtccccatagctgtcagtagagatagacaaccagggaacttttgttagaatcttaacattcatccccaactcttaattcctcagagagcaattttgcctcttgtctttttcatctccatcagctcctcctttggaccctctgggccctgctcatctgttctcctgctctcctgcgctcagatcgctttggggctttccttggacagaggttgaatgggagtgagagctgcccccccccccatcacagttctcccacgttcgcacaagatgaacagttctgtagacctggaatgcctatgactcaagagtctgaagtcaggagcaatgcttgtgtccagtcaggaggcagttcagggcctttcagagctgggccacgatttttcagtttggtattagagctctctgatttaaagctgttttgtttgtttgtttgtttgaatgccctatttaagttaagactagactgttgtacgatagtcagtcccaagtgtacgtctgttaccaagctcttgtaaaaaggtgttacagaaactgctaggacgagttttgttaaaaagaaatttcaactgtgtaagtagaagtttgattccatgtgtgctcgcgtcccgagtggagggttgtcaggctgctggcgtagttctgattcttctctggagcactgagcggaaagttggttttgctgcgttgcatgctatgccccgcccttcctactgatctgtaagcttttccattggctttctttctgtttcctgctgcttcttgcttcataattgaagggaggattcagacccatccaggtaacacactactagttctgcatggcctctttactactctgtcttccgttaatttacagtgcgattgctagcgatagatgcagtcatactggagactgagtctaggttgagctttaagcatgtatcgagaactgtgccttagcctaggtacggctgccgcgggccggcgggtgggcgggtgggcgggtgggcactgagttctgctcattttagactattctgaagctgattttgattccccacttttttttgcagagtattttagaaagcagaattgggatgggcttcagagtgtgggtgtgtcactgacactctaaagacaggcttctttctatctgagacagacaaccttagacaggattttaacttggtttgctggacttggaagaaaaggcttgtgctcatgtggactcttttctcctaagtagtttacagatggctggtaatattgctttaggttgactacttctaatttttttaatcatttgatcttgaaccactctattcagaagtcattgctttttataatgtagtgtttagggaaatgccagttcctttgttgtatttgttttagatattaaaatgaacagttatggtgcatggcttaaacttttagacagtggaggcctgagcatggagactgccttgtgtttaatgcattaacattgatcagaacctgacttagtgtggaatatattttgtgaacttagttattatagctccaagtagatgagtttagtagtgggggaaggagaaaacttaaggtactaaagctatatattaccctttgtgaaaaaacacatttttatctccctatcccagtttttccagaggcctcaaatccagcctccccgagctgccatcccaaacagcagtccttccatccgtcccggtgtgcagacccccaccgccgtgtatcaggccaaccagcacatcatgatggttaaccatctgcccatgccgtaccccgtgacccaggggcatcagtactgcataccacaggtaacagggcagcctgggtccagcggggtgcgggtgggtggggcagtgatcgacagcctggatttcgatgtgtgaattgttttattgactatatatccattttttgttgtcaactttaataaaactatctagagattcttattcaaatacacacgttgctggagacctcttccctgtcctgtctctcccaaaaacaagcactggcttatgtttcatagccaagccttcatgtcttgtagacggtctctgcacatggtgctttagtttctggaaacttccctgtgtcatctacacgtgtgctcttttctagtaccgccacagcggccctccgtacgtggggcccccacagcagtatccagttcagccgcctgggccggggcctttttatcctggaccaggacctggggacttcgctaatgcttatggtgagtaaggaatcgtctagctgcttctgctcattggtcacgctcaccttagtctgctggccacgttaggtattgctgcttagaggttcaaaggatttttaagtgcaatcttataaacggttttgtcttgagagatttttttagggagtagcttacaaggaaatgactataaaagtctgtgtatcagtgacacccaaagggctcatcatcctgttggagtcatgtggcaggtctgggctttttccaccatgtaactgtcaggcacatttttgtgtattttgttggtagtctacattcccctccctcagagctttgattctcagcacactctgtccttcatctcatgaactatctatggtgcagggatttcagtttctttgttttctgctctaacccaagcaccggcgacagtgagtggcagactctggagagtgggctgtgggcagtgatttcttccctgcacctctcaggcagcaccattgtcctggggcagttctgaggattagctgagataaatcttacaagatgcctttggacggaaagtcgatggggagacaggttctcactgggtacactgggctgtccttgaactcagaatcctcctgcctcagctttaaaggtgttttctgtacaaagacacagatgcaacgtgataactggctcgtgagttcacagggaacttagaaatccctcagataatcgaggaacgctcgggctgcatttgacacgtgtttcacccgcagctcagagctgtaaggaggaaactcagaatacgaggaactggggcttcggatgcagccatcagtgctctttcatagtgcggtcaaaatacagcagtgaggctttgactgtgatcacacacaatcatactgtgattaacacagtaacccactcagagtcctgcccttccgatttagtggcattgtggtagctttgcagttacttgcactgggctaactcaaagtctcttttggtggcaaggttcttaaagtgtgaaatcttccttgtgtgtgtgtcagtactgcctcatgaccctgtttcaaaatggtttatcttattatctcaattttctcaaatacgtagaacagctctgttaagttgtattctgacaataagtattgttatccaaatcttctgagtagaaaaacatatttttcagagtaaacgtcctaaaattaatatttctttaaattccatgttgcaaagtgaatatgttctaattgacagaactgttttccatggtttctcactaagtatagtttgcagcatcctcactggttcctagagtgatcttcagactctgaagtggcgcactaaattcttcctgtgtgttgaaacccgtgctggctgttgctcagtatgacttttgcatcctatgtgagaagtaagacgtagctttcagtttgtcatgctaaacgttggcttttctgtccagacagtggtgacgcatgcctttttgtcacagtactcaaaatccagaggcagtcagatctctgagctcaaggccagctgttctacatgaagatttctaggacagccagagctacacatagagaccctgcctcaaaaaaaccaaaacaaaaccattgattgatttttttttttctttctgttccaaggttagctcaggtgtcattgacatctgatccctttgagggatctctttcccgaagatatattaataggcatgtgctatagccattcagcgggcagagcatcatccacactaaatcactgtttcctgtgtcactgtgtcagtaaccaagtcagtgatgaaaattcaaataccaaaatgcagaaagctacagtggctcttaaataacacggaacagtgtcatcctctcttctccatttatttaaatgggcatgtagctgtttctaacatgaacgttatcactgggcatctaaatgaccacatacctctccccagctcgctttctccattcgttcannnnnnnnnnnnnnnnnnnnnnnnnnnnnnnnnnnnnnnnnnnntgtgtaccatggagcatatggaagtcataggttaacttgcagtagtgtttctttccatttcatgggttctggggatctgattatcagacttgttggcagtgctcactctctcccagccttctcgtcactccttcctttcctaccttaaaacacacacacaattatttgtttcttttgaaaatagtatggtctagttttggaataaatcataagtgatgttactgctaacatccctccatccttccttcagttgtgagatgctgattgccagtttctgtgcttttctgtgatttagaattcgggccggcccattagtcccctcagttgtagacacctcaccttcctcatgagggattgtggcactcttccctccttcctggctcctcctcttaccttgccactgccagctactttccttcttccttgggtgtaattcagagtagatatgggtcacagcgctgtgtaccagttcacaagttctcgtttctccagaggagacctaactgttggtctaccattgagttatatttccaccccttttagaagacgtattttcagccagtgtttaatgagttggcttccaggttcatgattctacttccttagcctctgggaaagtacaagtgttcttgaagtgtttttacaattttgagaaagttagaggccagaacgctcataggtcagcctcaaggagtgatgtcccatgttgacagcagttttagattcttgaccaaaagggtatggttagtggtggtaatgtttatgaagaggaagaaggagaatttgctatgtggcaggccttccttgcctaggcttgcaatccagtccaccctatgtctcctttcttggtctgttccctccggcgccttttgcactcttttcctgagcctctgcagaactctggctcactgcgtagcaagcagccctttaaggtcatttgagctgtgctgtgtttaggaaagtggtctcccaatagcatgcagaaaacaataaataaaatgaaagatgcaattgctatagagcgacataactgaggacacatgctctttttcttctggtgtggccagctagatatttaatcaacacatgttctccatgcctttggccagtgctcattttcatgtgttttcagcagaactatgatgtattgtgttgtgttcttttagaatgcagccagtttcctgcactgcttgggcccacctgatctcctgcctgtgtagcctgtgctgggcccgtgccctgtgcctgtgtagcctgtgctgggcctgtgccctgagcccagctgattggtcagctgtttgctgatgagtggcagccgctttctcactggtctgctcactcagtagccttctctatcttactccacttagtttgggaagtctggccaggtgggctggtggtctgtcctgtggcaagcgagcgtttgaatccagtttgagggtcgttcttgtataggagctgacagcaggcttacctcggggcacagctgatgagtctttccattgaatttcctgaaattgtagtcttgccctgattagatctctcccaaatcacttcccagatgccacagatgcccaaagagcctggcgctgtgccccgttccgctcctgggaagccacatttagagatgacttcgaggtgatgactgagccttttgcctggtcaccttgtctccaggcgtttcttcctgtgtactggaccccagcctggccacacgacctgaggattagtcaccagggatggggcaccaacttcacacccagtacttaacaataattgggggtggagggcttgtttctttctttctcttttaagtaaacttgactgtgtagctctggcagacttggaactctgtgtggaccaggctcaccttgaatttacagaggtggacctgagatccttctgagagctgggattgaacttgggcactgccattcctggctcagtaaactttttaaggaaaaagattatctctctgcacagtcttttttcttccttcttgctgcttagccttcatgcttacagagctgtgtgctctcttgtatgtttgtctgtttgcgtttttgagacaaagctttcctcgctaagccaggctggacttgattccaggatctggctgccccagcttctcagcgctgccactgcagtgtgtacctgactccccgatgctgccgcgtgtttgagggtccccggctgatcccttcatccccctccctctctgcaggtttttcttccttctgtgaactctgacatggatgctatcttgggcttctttgtctttattttctgacttgtttactcccatggttctggagttattcaccacaaaagcctttactagtgcggtggttgaacacccttagttccagcactcggaggaagagtaataaaataaaataaataaatttcggggcgagtgtggtctatctagagagttttcagatagccgaggctacatagaaaatctgtcttcaaaacaaaacaaaaacaaagcttttattaattacaaaataaacagctgtggatggtgaggtgcagcccagttgacagagtgcctgttctctgtgtacaaagcatccggtttcaccaggagagccatggaaagcaggtgtgctgagacggccttctaattcccgcactgtgaaggttgagctaggaggatcatcggctcacaggctgctgccttaattccatagcaagatctctgtcagccctcactccgtgataccctgcaggagagcagtcaggaagcggtagggtaactataactagttcctgcctgtctcgtgactacaggattagtgagcctctcttacagctccaaaatggaaagctttctcatccaggccctttcttccgtgtttcatgtgttactgagtagttcccttgttcttcctctcaggcaaataaaaatttaaaaaagacccttaaacaattttttttcccaaaatatattttcttccatatcatccagttctttagcaaatcttttggttttattttgtaactctgcacttctgcccacccttttctctgtgtgccacaatttgatagtacttagaatagtattgtgcagtttggatattaacgaaccctttgtgtctaagactggggagaagaaaatggtggcagttgggctgtggagtcaaagcatgaccaaagtccaccttttagttttggttgatgcaactgtggtaggtgattgtggtgggcgggagcaggaagtgggcaggtagagggaggtagcccttgtgtacagaaagtacaattcagcttgtagcttgcttcttggggctttgtcttctttgttagcttttgttaaagctcctcacccaagggcttgtgggggcctcccactggcctgctgtggctgtggctcttcacactgagactttggatcacctccgtgcctaccaaatgcagaaagatagtgagtgactcaagcccttgcctaagaacccctgttgtaggccacaggtcccagaatagattctttatgaaaaagcaacccagattgtgtttgaaaaagataatacgggtgtcactctgcaggaattggcactgagatattttcatattaaattctatggatgtttggagatagtccatattttaaggataatttcttgaccaattcagtagtttgtaaggagtttatggaaagatataattaaaactactgcccaggtgtgtggtggctcgtggtaatactccatccagcaggaggcagaggcagggggatctggcttgcaggtcagctcgggccacagagttgagaccctgtttcagaaagaagaggagtccctagtagtttgctttcgtttcccccaagagcttgttcagggacacggccctgttgtcaggctggtagtgtttgacaaaataactgaatgcttctcattttgttctgattccttaggaacgcctttttacccaagtcagccagtgtatcagtcagcacctatcatagtgcctacgcagcagcagccccctccagccaagagagagaaaaaaactgtaagagatcttcattgattcgtcgtaaattggagcatataatcatttctaaaataagcatatccaatcattattcacctcagttacaacagtgactgccatttcttcctctcctttctatctctgcctttcacctcagcctagagggtttacacaggcactcggctaggacatgcatatccacgcccttagtgtcacctctttccagccattcgtgctgcatgggtaagcgcacctctggctccttctgtgggaggaactctggcttatttctcagatcctgtctctctgatactacagcgctgagcaacatttaggacccgacacgagggaacggtagcaccaaattagaagaagccaaaatcctaaagagtcacaaggcgggaagacttggaagagagaaacacaaagcaaaatttaatagttaagaggacatttccctctgtctagtaagccacacccaagagcctaagagcgcagtgacacagaactggaattgtgaaatgttttgtagaagatggctcccagtgtcttccccagcagaacatagattgtgatgatgacggtcagcaacagccccagatccacacgggtgatggacctgggagtgtgcttgtcccatgtgctctgacctgagaccaagtcaccaactcagatttgctgctttggttagaaacaagtgatttaggaacatgtctcagtaaacagaacactccaatttagcatgacacagctggcaagaaatggagctttaaagtgttcacttggtatgggaaagttgtctgaatggtgtcctgtaaggcaggaggaaatggtgctaatgtatagataacatataggtgatggtggtggtggtggtagtggtgatggtcagcagtgagccaagaggaagctggctgtggcacacacttggtatctgagcttggggaggctgagccaggaggcttaacacaagttccagagatgcctgggctacacagtgagttcagggccagcctgggctaaacagaaaggcagtttggaaaccagacaaatgggctggtaatgaagagctgcttccctgcagccttgcagatagatagcctgatgttttttgatagtgaattctctgaagttctcaagaaagcagttagcttcttaagctatgcaagcaatggacatcagaaggggacttcttacccatggcccagctcagagttcctgagccctgggattccatcctcattatagcacctttgacattgtaagcatgaggaaccactgacagttgaaacaggaacacatgcactgagctgtgtgccactgtctaacttagcagagagcttggcagtccttctgtggcagtacatttagatctgcatcatccttcctcctggtcctttgattaatttacctgtaaagatgtaggatagcattgaactgttctgtgctcatttggcctgtgtgatgtgtctgtgcctttacttatacaaagcaacaggacagccactgtccttacagctgcgtactgcagccagatagagtcccactgcgatacaaatgcgcatctttattttctgcacttcaccattagggcattaaaaacttaactcaggcactttgttattcttaggctatgtgtggctctcgttgctattaagaactctgagtaaaatcaatgtatttggcaatcttacacgcacatagatggtttccttctttgacctagaaatcaaacctgctcagccctannnnnnnnnnnnnnnnnnnnacatatggttctgtgattaaagtagaaagttaacaaatttaatattatctgtgtgtatacaaatctggtacacagaacaccacatttactcttaccattttatttaatattgtagataagaattcgagatccaaatcagggaggtaaagacataacagaggagattatgtctggaggtggcagcagaaatcccactccacctataggaagacccgcatccactcccactcctcctcaggtaagtagagtgagcatgaccatggcggtgggcgctgggcactcactcattgacctcctcgctctcttccgtagccactctgtcctttcctctctgtcagctgtccagagcctgagtatctcaggaagcttcgacagacacggttctcttcccgagttgctttcaggtcctactggcaatgttttctgtgggttggcttcgcattcagagcacagatgctgccacacttgctattgagctgttccatgctatccaaaggtgcttcgtgccttggaagccaccctattgagtgagtagttatgagtccgctgtggagccttaggatgaagtgccgtggaagagggtggtgtcacagtgaggatgtacgcgttgtggccgggatgcttgagaagattgtccccgttagagtctcgttcaggacctacacagctgtgcttccaaggctgctctgtgagtttagtcaggcctgactggtaaagtatgtggctttggtcttagaagaaatcgaagagtcccaagaagagctaggcttgagcaaactgtgacttgtggcattgaaattggttgcccaagtttgaagcttcttaccttgttactgggtgacttcccaacgtaatcagtcacctgtcaccgagagcccagcagacagaagcacctgtttaaggggattgtttgtttgttctcatggctggaaggtgagagcccccagagccgatttacaaatgagcattagaccagaggtaaggcatggcagagtagccaaccgctgacttgattaccgccacagagcctcaaagaagtgctctgagatattgaggtcaccaagagtaagcgagttcagttcagagccctcgtaaacctgtgacctgttggcttgagtgggctgtgttccccttgggagtgatggtcctctctgtcgcagtccccattacagagaagagtatgtggccacctcggttagagggtttcaaggttgttacagaacttatttttgaaattgtcttctttaaacattttaagtctgaatgattaagagtgtggttttgtctccagaattgatcatgcaatgggatagtagatccgaaatgacctacatacatggtttattgacagccaggtataattctagacatagtggcctctcggacggcctggcgggtgctggagtagaacttgcagttggttggtgaggacatgcacactttgcaccctttagtctctttgcaaacatcagttaagatagggtgtagttgacaacttgaaattcccaccttgaaaatctgtacctttctgtattttaattctctatatggtgtgtctggttaggtttttttgttgttttttttaaggatttatttttgatcatgtatatatgtatacatgtatgtgtttttatgtgaatgtctaacatgtgtgtggatgtccttagaggccagaaggtgtgtccctctggagttggagttactctaggctgttgtcagctgcctggtgtgggtgctgggaacctgactccatcctctgcaagaacagtgagtgcctttactagtggagctctcttgcacccagcccattcctgtcttcggatcttgcaagtgtgaccctgtgccttcccagctcttcttcagtccttacccccttccctgggaccacaggcgcaagcacaagtcttggtgtctgtatggtgggtgacaactcagatagagacagtgattgctgtggagagcctccagtcttgtctcttttgtgttcttacatttgaatccacccgtacaaatcttggctctgtgtatgcgtggagtctgtgggatggatcgtagctgtttaattgatgagtgtactttccctcttaaagtcaacagcagaagcattacagcttctggcttcatttctgggaggtcatggaagctgtgcccatagacggctgaacttggtgaagggagattatatcgtgtcaaaaaatactgagtctgttcttttcctaaaggctgcaggctctgaacattggcgctgagttctctttctagaaagccctcggcacagggcctgtaatagacatttgaagttaggacatgatcctggatccacctgttgttgttgttgttgttgttgttgttgttggagacaggatctcacactatagctctggctgtcttttgctctctagaccaggttggcctgaactcacagaaagtgtctgcctctttcctcctgggatctggtattaaaggtgtgggctcccccaaccccgcctgccagtccatcttgaatggctttctagtttaagagctactatgaggacagccttctctgttggtgtgttgggccaagcatgtttttgttctcatagtgtacctgcttttgtttccagttagcaagaagtctgggtctttttctgcgctgtccagaataaaactgtaggtgggtaagctggttctgacaggctgtttccttgggtgtttgagagtagatggtgccctctagtggtagcagtctttatgtaggccttgaagttgggattgctctgcccttagcagcagcaatgttacagctctgggctataaagacctaaccattctatccttctccctgtacccagactccacagtctctatccagtggccttcagcagtgtttatccttcaggctcagcctctgccctcccctgccatctttcttttaatttcttctgccctggctgttcttaaaccatccagtttctttttcgtttgctgccaagcagccactggctgccttgcctcttctgctgagctctgccaactgatcacctgctgttgacatgcctactgactctgccactgaagacactttgatgtctattttttttcttgtgagctcagcccatacagcggaaagtaggcaaggtacaacttgtcaagccttttattggacctaatgtcacaacaacaggaagggtgacacttgacagcatctctctgcagagtcagtacttgagcctcaacagtgtgcgtttgtatccagatgagaggtatttgagacaatcacaactcaccttgcgtgcaaacaaaggctgatgtctattccaatcacaggctttcttccttgggctttctgctaggtcagcaagtgaggtgctccccttgtgtcccagatggtaagggctacagggtcacctggagtccatcatggtctgtgctagcacaaactgacaactggagcagacctggttggctgtatgttcaagagctggggcagacttttgtaattgtgtagttttttttcaggcatccctggaatgttccaaatggccattgctggcatgcagcgtgtctactggctactgaactacagcccttcagtttaaggtagccaggatagcagtggcacccccacagctagggggcatagggaattcctaggaaatctacttatcctacccttggtgtctctgcctaattaccaggagtgctcccaacgagagagctctaactgcttattcccaagggtgactttaacttgttttcatgttcttttctgaaataagggccctggcccagactgatggcagttcttctgcccagcctcctaaggttagaatggcagacatgtagcactatacttacaacaaattgtagcagtgctttaaccctgcttagcatctgaccagacttcatagcaggtgggatcccattacttaactcctttgaagtcccacacagttgcttgtgcgtccatagcaaagctgactgctggcatccaggctgcccttggtttatgttcagggttgtacagcatagactacacagagtggcagatcatagagaccgggtactagtgggttaggtgaggttgtattagagagtcctgggagttcaagaatgggatacagacagaccttacagaaagataccttacagaaaaatgtaatgtaggaatataacacacacaagttagtaaacagttgagtgctgtactttgcccctgctgtggtttctaaggctctcttttaaggctgacagcacattttagcttggcttcagtctgcaggtctgtgcacaggtcagctgagtgaggaggttaacccacaataactgaatcaagacagcattgctcataaatcgtgtgggactcaggggtcagcaggtcacaggaagcatgaaggcatcaaagagatcaaccagtggggctgagaggggaagaaagaccgggtgaaaagactggaccatgccttctgtaaggcctgtgcctattctctgtcaggctccccacggacttcagtagtaaggaaagatgactctggtgaaggaggcaggtcttcttttgtctcagtgtgttgtcatagtcatggatgtgttggcttttctgccagtgggattcataaacagccacacatggaacttaactgagctaagctgaaggagtctgcatggaactcatggcaggcctgagtcactgaaagtcaccagagatggccgctgagggtccattgacaggaacaatcctggggtccacatgacgaaaacctgaaggcaaagggaatttttactgttgctgtctgctctaggcgtcggtgaaactacaggctgtcttccctagtaagtttttagatgatctctgtgtgcctcctacagatgttatgtgtcatacacatagaaagtgtgcttcctgtgaccatggccccaccagatggtcaccgtgcttggacgtagatgtatgcacaggtcttagagaacggatgcttttcacctgagagacaaagattccactcttagcgcagcctagtcagtgtaactactacagtggagaagaagcaatggtatccgcgccccccccccccagtagcaagcccttcggccattggtggtggttagtgaccaagagaggtttctatcctcagaattacctgctgcgtagcagctggcctctgaaaaggaacagaagagattagatagataaaattttaaaatgtccacgtgtagtcagtgatgtgtagaccagaaggtgttggatcccctggaatgggagctaccatgtgggtgctaggaattgaacgtggctcctctataacagtgagaagtgctcttaagttctaagccaattctccagcccccaaatagattttacaaactactgttcattttatttctttcgccctcctttctcaccacttttaggatcagccttcgagtaaataatagctgaaacttggtaaagggtcttgtggcaaggagcacaggtcagggaaaagttggaaacggaatcattggcacatcttgaatgtaaatcttcttctgtagtttggggaattgccagagccataggggagttgtcccttacagaacagctccacacacacaccccacctctgggaaatggaatctgcgacaagccatttcatgctttaacaactaatagcttcatgctgggttggcagcacaggtacactcctgtgttattagtgtaattcgatcaggaaggaggcaggacaaacaaacaagaaaatcccgctttaacttttaagtagcgatcttgtcatccatgtccaaccaactcgtccaatttggcactgacgagttggttgctctcttctgagaagcgtatttttgtagttttaaatggtgattgtagtaaagatgagagttattaaattaagtcacattgttcttgttagtatggtagtgttagtactagcctttgaatgaaatgttactattcagtatgacgagccttaaggactaagctggcatgcattctttgtgtttaaatgcaatgtcatggtgaacagggtctgttgcatgcttaactgtttggatttagagtgaactgggtgtggtggtgcacacctttagtcctagcacttgggagacagaagccagggggcagccagggctacaacagagaagctctgctttaagccccccaccccctaaaaaagctgttagaatggattatacccaagagataactttggcttgatctagttttggcaaaatatcttcagatacaatttagattccccatttgtcttaaatcagtcaggaaatctcactgccttaagaccaattctgtgttttcttgcacttctgggtagaagccaatgaagccagtgtttaggttgtttagccagtgtgctttaggttggttatagaaaccatcattctcattagattgtgttttcctagttttgtagactacagttaatcaaactctgagtgagttagtctttgcttttagagcgtaaggcttcactttacatgtgttatgaaatacactgagcaggagtaagggactcctggcaggcctccaccaggggatccctctcaaatttgccaggcctagtattaaaggtttattgtgggaagggagaggagcagggacctggaaagggggcagaagaagatggggagaggtgagagggacagttaagggcaggaagagagaaacaggctgaccaggctggaggaaggggggagacagagacagaaactgagatggagggaggaggagggagacttgggtagcaagcagttctctcgagtgctgctgcccttgtctctcaccagtggcagcacgggtagtactgggagatggaggtgacagcagctgttgctagctagctgttggatggagcctagtaaattgcacgccctctggacactggaatcagctgtggtggtggcatgcgtacagttcctgttccctaccacctgttttaagaatgccaggcagtgagagtggagactgtaaccatccagaaactgatgcacattgttatgaggaattagcatctgtccttcatgttagcattcgacctgtccttcatgttaggtctagaaagttagaataacttccttgaacaaagtagcacatgcctgtatctcagagcttgcaggagcagggggaacagaagttgtggtcatttccagctaactattgagttcaaggcagcctaggatacatgagacctgtctttacaaaaaaagtgcaaatgaaaattaacctagctttatgtctgtacaagtacaggtaatcaatctctggaagtgacaggaaagagaaggttaggaggttaggccccaggtctgaggtcttttcagacccttctcgctgaatgtatatgcatgtatgcatttgcatgtatgcattcgcatatgttctgtgcctttgggtttatgtaaaccatttgccacagcatcttcttaactcacagaaatcagattcatgctttgccacaggtataattcccaagggacagttatagtctacattaggactgcctgcattccgttgtttgtatgttaaacagtttaattgacaggccatcaaattgtttcaaattgtttcctatttgtgtctaagtgaagcatttggagtgatgtttctgcctgtttagggttacagagtttcccttggactatattggattctctctatctcagcagtatcagagcattccccttgtttataatttttttatctgacagattagaaaaaaataatcaaaagaaaaaaataaccatgcttagttcttatagatttctgaagtgaagagtttttattgtcttgtaatttctgtgtgcatatacattatttgtctttacatatttgtattgggatactatttgagttttttgcaagagccctttatatgttaaaggcattccttgacatatatggtttactttggtttttgctgctgtgacaaaatactgtaggctgggtaatttataaaccatagaaggttgtttggtgattctagaacacagtgctccgggctcaggccttcctttatcattccaattcgaaggtgagtgggaaggaagaggtagcaagagggaggaaggtgggcaggtgggcaggcagccctgagggagagtgggcattcattaacagacctactgattgtttgatgggtttttgttgtttggttggttttggtagaagacaggatctattttgccctgtctagcctagaattcacttttataaactaggctggccccaaactaacagatgttgaaactaagggtgattgacaccacattgggctctaagaccattcttactgtcttgaatatatcaggagccctcgggagtccagcagtcaggcccttccctggctttgcagctgtgttggccattacacttctagcaggaaacctcacacatgaatttcttattttgtgtttgttttgttaatggcagagtctagaactcactatttacactaggctgcctctatgcctctcagtctaacttctcctcagtgatttgtgggggcttggctttaatacagcccttcctgatccaagacagcacaggcagttcatgnnnnnnnnnnnnnnnnnnnnnnnnnnnnnnnnnnnnnnnnnnnnnnnnnnnnnnnnnnnnnnnnnnnnnnnnnnnnnnnnnnnnnnnnnnnnnnnnnnnnnnnnnnnnnnnnnnnnnnnnnnnnnnnnnnnnnnnnnnnnnnnnnnnnnnnnnnnnnnnnnnnnnnnnnnnnnnnnnnnnnnnnnnnnnnnnnnnnnnnnnnnnnnnnnnnnnnnnnnnnnnnnnnnnnnnnnnnnnnnnnnnnnnnnnnnnnnnnnnnnnnnnnnnnnnnnnnnnnnnnnnnnnnnnnnnnnnnnnnnnnnnnnnnnnnnnnnnnnnnnnnnnnnnnnnnnnnnnnnnnnnnnnnnnnnnnnnnnnnnnnnnnnnnnnntaaaggtggaactcatgggccttttctccctccctcacacatcccagacacctagtcttcctgtcttctctcaccctcctgcctccacagagcttcctagtgtatcacagacctgtattaggtaaaattcactcatggccctcgccaattcctgcacactgactgcattaatcttacaaactgtatcctattttctcttccctctggttgaatcctccacaagcagtcagaattaatctttacttttaaaattctaaacattcatatattattttgtatgtgggagtggttttcctgcatgtgtgtatttctgtgttatgcctgatttctgcctctgtgttatgcctgatttctgcctgtggaggccaggagaagacatcagatcacccgggactgaagttacagcctcttcaggagcacccaggctttaacagccgagctcatttctaaagcagagctctgattttgttacattgctatacaggccgatcattcacttcacagtcttctgctcagagaccctgagtgaacttgctttctgcagtccactcgccaaggggctcccattcacatccccccctcctcagcgcagttcactgtactccccagatgcagcctctcggacaataagaccccaattgtgctgcctttaaacacattttagccctccagtgtcacatttacagccaggtggagccagtacattgtctttgtgctccttgtcttggtatttatttcctttgactggatgtcaggtccattccattctggagaatttgtctaaattccagtagattctcagtgttttgttcatagttcacacagataaagaactgtctgcgagtctgtctgtccatcggaagtatgttttctttcttcctcattgcgtctttaaaattaaattattttgctatttgtcttgggtgtttctcagtgaaggccatacttgtttatattctctggacctatgcatattaaatataggagacattttatatgaggattccttatgttatttgtacataactgttggaagtctttgccttcttctcactggtagtagggtgggcacgagctgttagtatttgtatttcaagttttgttgccctgtcttctctgatactgtgagtctgctctagcatataggatccatggccccaccacccacacagttctcacaaatgaatgtattgggtttttttctagatttcccctactccagctatttcaaaatcttccaacattatagactagtcaagacctggttggtgcgccctgagctcctcttgctaaaaccctctgctgggacactgttgagtagtcaccctttctggacagaagcagtggctggattgtgcagaggagcatgaagaacagttctaaaatcctgctgctttgcccaccgcccagtccggagctcaggccgtccttgaactctgcggtctcagaagtgcaggggcagctgcgctcagccatgctggccacctccactgtctagcaaggagaccctctggtgctttgtggctgttgtctgtctgctacattgtgagacaagctaaccgtgcaggctgtgcttgaatctatggcaggcttccggtctcagcctctcttgagtactgggacctgggccgagccgccatccctgggttaaggtgtttaaggaggagtgagtccctcttgtatttggggagaatctgtccttggctcccaagtcctcagtaagcgtgaccctcagcgtgaccctcctaaccagaattagaaagcagttccctgtgttcttggaagctcttcacgccctgatttagattcccctttcactgtgtttgagtctgagggtctctgtgttccctcctagcagtgaggacctgcatcttatcaaggttttacaggatggaacttggcattggcacacattgtaaactgttgaagcattgaggggagattgctgacttagtcctagtctattgtgattatctggcatctttatggttttgtattgtcgtttgcagcactctttggggacagttttttcattcctacctactgaggtaaggagtgtgggattctgtgagtgtgtcaatgtatttatttctgctggaagtcattttctttgtgtgtctccagatgttcctattagagactgcatttaatgtactttgtgatttttatgacacattaagtgaaccaattcatggtattcatggtttgggaacacagggtacacacgcccctgtttggctcatggtggttgaattgagattatgccagattaagactaataaagaacaagattaaagtatttctatgttagtattgtcattttcttcatattatgtgatatgaagtgttcaaggtgacagtagtacagaccctttagttcttgcttacccagctgagccaggggcagcatttcctcacagtttacacagtaggtggcagggccttaatttcctgctcactcatgacacactcagctgtgtgcactgtatacgtgtgttcatgccagtgtgcatgtgtgcagctaagtgtgaatttgtacgtttgtgcaagtggccatcatgtgagggtgtgtggaggtctgaagacattgttgcgtgttttctcatgatcagcattcatctttatttttgttttctttttagtaaattttttcatatattttaatcatactctttcccatttcttaccctcacctccctatccactaacttcattcatgcttaagtttgcatgtgctctctctgtctgtctctgtctctctctctctctctctcacgcacgcacacacacacacacacacacacacacactcattcaacagtaagacaaaaaaaaaaattgaaacataaagctccgtatttgttttcagacctgggacaaggggctgaggtgcagattttacacatcaatgcagacctggcctccagttctcccagcatccctcagtttctacctggcataccctgcatgcaatcctgaatttaccagggcagaggttgggctgccctttccccagaggttcctccctatataatcctgacatcattattattattattttaagattatttgtttatcttgtttattgtagctgtcttcagacacagcagaagagggcaacagatcccattacagatggttgtgagccaccatgtggttgctgggaattgaactcagaacctctggaagagcagccagtgctcttgaccacggagccacctctccagcaccctcccccttaatttttttcatttaaagatttaaatatgaaagagcattgtaactgtcttcagataccccagaagagggcatcagatctcattgtgatccaccatgtgttgctgggatttgaacttaggacctctggtagaacagtcagtgctcttaacctctgcgccatctctctagctcttatcactacatttggtttctcttctctttgtgggtgacctctttctcctcctaccccgtcctgtacccccccccaatccctccaaggccaccccccccccccagcctctatccttggggccagtgaacttgcccaagagcatcttcccaataaacctgcctttaatctaatctgatttaatttggctgttttcactggcagtggagaacttacccatcaccctgccccctcctcccaccaaaaatagggttcatatgtgtctactcctgagcaacttccacatagatgctgagctctgtgggaaggggtttgatgaagacatcccatttagggttgagtgtctggagtctctcactctctgctctttgtccagctatgggactttgtttccctccctgtctactgcaagaggaagcgcctctgaagagggctgagccaagcactggtctgtggccatagctctttgttcttaggagtccttctgttgctttgttcaagaaccgtagcagcacatgctccctcagggcctatgtatgggcatctaggttcaagttcttggtgactttagcaattttaggtatggctctgtctcatagaatggaccttaaatccaataagaaagtgattgattattcaaattatcatactatctacctttttctttgaaacatggtttcagtaaacctgaagttgatggattaggtaaggctggccagccagtgatctaccaccagtgtgtactctgtccccacactgagagcatggaaatgccctctggtgcttttccatgggctttagggtcctgatgtgtagataggatagcttcctgcacctcccccctccccccttcctgtaatctctcactgaaccagtcagctaggctggctgaccaaggactaatgtgacctacctatctgttgcctccctcacctgaccatggagttacatgtgatgctaccacatctggcttttccacaagtgctcaggtctttacatttgtgtaactcacagctttactaagtgacacatttctctaacctccctttctgaggactctgctttctagggctgttaattcttaatgtctgtagggctagtgattggactgctcccctgcaatgctggagacccgcaccaggttttcctgccacagccaggctgagacttgtagactgtttgagggcatgtcttcaaagctagctgggcactacagaaagagcttgtagcaaacaagtgaatagtagttatttctttcatatggttttaaggcattttagatggacttttggtatttagagattcatgggtctgtctgagtagctgcttaccaccctaagccgtttatgtgatacttgtcaacccaggtattaagaagaagggtcctcacctgatcttctgagaagctgcagtccgtggtattttctttaataaacaaagcatacaaagttttcttctgtgtgtagttaaatgtttattaaaacactaaataacttggattcttttcctttttatctctctttggcccatagaattgaacagaatcaacattttaaatttggactctgaggccttcctaattttctatttaatatgtgtttccccagaaactcagggactcaggataattgtgacagttgccatttctttctctgtggttcaaaataaaaatagcgactttatctttactctgatcttagtagccattatcgagaaataattgtgtagtgtgagcagtttgatggtgtaatacatttgcaaagttgtggcattatttcctttctcatgatatttttctccctgcacatacagctgtgtataaattacatcttgcacaccctagaaagcagtgttatttattatctattataagtgatctttcacatttatagttccactttttctacacaagacaggatttctttttgcagccctggaactcagtctgtagaccaggttggtttcaaactccgagatccacctgcctctgtcgtcctagtcctgggattaaagtacgcctaactaattgtactttaagaagtttaagacacgtaactgaaagtattttttgctagccctacccgttaagtagcccctatcttaaccatcctgcactgctccctccctgcctgtagtaggaaaggtttctatggcagtttctgtagaattcagtataggataccaaaatgggccttcgccctcgggagacactgctttcttctgtggcttttgtctaactgtgtatccgtgcacctgcctggagcgcctatccttccttgtgttgctgtttgctctaagttgcacaatggctctagtttcctcagcctgcttactccaggtttagcaggcattttttagtaccagagaatggccaagtataaaatgggagttcctcctgttgtgagaagccagagctttgacttgcttttcagattcttcaaagtttccacggcgctggctccatagtgaaggtggcagggacctcagctactttgcacgttgcagtccatcggagagctcagcggctgtggcagccatcagggcctctccacatgcttggttcagtcagtcactggatgacaaatgcttatatgcctggtctgccctctgcgggcagatgaagtgctttgctcaggattttacaaggagagctgacagaacttttagccagtctgggacgatgttgagtcctgtcccgctgtggcagccatgactgctgtagtggagctcgagccaggaagggtcactggagtggttgtgtgggtgcttgtgctgtcttctctgccgtggttaatagtaatcatctcttctcctccctccccgctgcctctgtcctcctctcccctgtttttattcaattgccctatatacacccccaccccacttttaattttgtgacctctcgccccctctgcctcccctccttgcttggcttccatgttgctagtttttatgttcgcgtgctcattatcacccttttttgtacttcaaatcccagcagctgcccagccaggtccctgagcacagccctgtggtatatgggactgtggagagcgctcatcttgctgccagcacccctgtcactgcagctagcgaccagaagcaaggtttgtgtatgactgtttcctccctctatctttagtctcttgtataatgacattgctcacggtgtcccatcagacacccgagggttgctctgactgctctgtagcaaatctaaggtagaaagtgagcttgtaggaagggaggggaagggtcttacattgcacctgccttgctgttgctgtctatgtgtgaggaaacacttagcttgaggagagtgatcaaagcatatctatatattgatttacaagagcagcacaggtgtattttcaccattctatggggtagttgctatttctcagaggagataacatgtttcctataagcctgaggcaccagacctcagaacaaggagctgaagagagctctggaagcagacaggggccttggctgtgatgtcctgctggggcccccacctgggccttgcagtttcttctaccaggaccaggggtcttgggaggactctcccacccacgtgtaaatgacagctgttcctccatcattgctgatgcaggaacagtgtccaggcttctgctactgagcagggcacaagctcccaggcgcttatcgaaagcaaatacgatgccttttggaggaaaaagcttaaaagtgagaagtggtctttcctttcctgactgatggatttcactttgcctttgtggagcttgtgtccagtgctcagtaggaaaagggagcaggcacaggcggctgctgtcctctgcttctggcttcgctccccagtgggcatcaccattgtatgctctttgaggtctccattcatcaggtctactacagctagcttttgggggtgttggttgaagttggggttttttatggttgttgttgttttgtatttctagactgaatttctctgtgcagccctggctgtcctagaactttttaaatgttattgctgatactgggaatggtccttaaaatagaagtatttgagcaaatgctcttaattttagcatgattccttttttatgtttttttactttttcaaagggtttggtttcacacaagttaattacattcaagctttttgaaaagcttgtttgttggttggtggatttgtttaaacaaagtctgaatactgtagcttagggtggcctggaccttgtatgtagcgtgagctggcctctaattcttcagcctcctgagagctgagattacagataggagcctccacacctgctgatttcagttttcccatgagctactgtgaaataccagaccctccctctccattgagtattgacagtagcattaaacctttataagataattttaaaccaaaagataaaaaactcttagctggcctttttttttattattattattattttaaatttatttatttattatatgtaagtacactgtagctgtcttcagacactccagaagagggagtcagatctcgttacggatggttgtgagccaccatgtggttgctgggatttgaactcgggacctttggaagagcagtcgggtgctcttacccactgagccatctcaccagcccccggctttttttttttttttttttttttagagatttatttatttattatatgtaagtacactgtagctgtcttcagacactccagaagagggcgtcagatcttgttacagatggttgtgagccaccatgtggttgctgggatttgaactccggaccttcggaagagcagtcgggtgctcttacccactgagccatctcaccagcccccccgnnnnnnnnnnnnnnnnnnnncagcagtcagacatgtagaaggtttatgtgtgctcagtgctgagttctaggtatcagagccttggccttgcagagggtgaggtaggtttggggaaactgctttttctctccagtgattaaagcactttcaaaaagaaaagcttgaaacaggatctggttttgaagctcaagtcgtttgggaactcgctatgtacccagcactgagctcagggttgtgaccctcctgcctttagtattgtagcggcgctgctatgcccagcagtaagacacttgaagcaaacattcttgtatgattttactcatagtgacgaataatctttagtagattttccttaaaattttagtgcacttttgtacagatgtaatccagtcgggcatattgagtgtatctgtacaactctattgaatacatcttctttgcatactgcttccacaacgaggcttcgttataaaaacatccatatcatagtaggtaataagggttcagaccagcctgacaacactatttgaagttgttttaggaagaagactgctcaaattttaaaaatatgaaatatttctattttgacacttttaggtctatatatattttcaggaagggaaaatggaaaattctataatccccttagctgttttcatgtcttataaatttgagttaacaaaacaaattttcaggctgctatacaggtgtggatggattagcaaatgttttagactgtcttgagagtactgtgttttgagtactgtgttttgagtacatttgagagcgccaatgggcagccctttgtgactgaagtcgtcgtcacatcgaggattttcttgggggttctcatagattgccaatatgtgaagtgatttttagactaggtgggcttttgttcggggtttgaagtgtggcctcccgaagcccaggctggcctctggccccatctgtcgctcaggatgactttgaactcatgattttctgccatctcttgcggttcttaaattggagatgtgtatcacctctcccaactcctgtggtgttaaggatggaatcctgggtgtcactcctgccaggcaagtttcacccactaatgcaccccagcctcaggggctcttgcagctgatgctgctagtggttgtaactcaaatgctgctagaaagggctcttgaggaggagtttttattctgttcttttttgattatgcatttttctttatgcttgcttttcagacattaaattccttttagggtaagtgtagagagatgcacttacttaaaagacttgtaagctgggtgtgcctgcacacacctctgggcagagtctgaccttgtctacatgcagagttctaggcctgggactgcttaaggggactgcactgtaattgtcccccagacattagtctgtgctctgccctgttggttggttttctgtcttgtcaatgggtctgtcaatgctgaggtctgaactggtaacaaaatgcccttcctgctggcctgctcacccctgagtagagaaacgtggggtttgaagtcactcttgagccatttgctagttcggtagtttctggaccagaactgatctctaagcctcagattcctcttctgtaaaccatgagcacagtaagtaagtagtctatcctgatggaggggtaagaagtgaagggaacaatcctgccgggccgttagcccaccttgtgctaggttcttagtacatgtcagctgtgattattacactgctgtctcagaacccagcacatgagcagatgtgtttatgttgtatgtggacagtgacacagtgtttataaagggagaactatggaatgcatgaggaacttggcttggtgttcacctctgacagcagagagcactaactaaggcttttctcttccttgagagagacttgagccagtgcagcacaatgcttccagggtccagggcatcgggagaggtagacacggcagtccctatagtcgccacggcagtccctatagtcgtcagtcttcatatttttgggaggagtttgctctgcattcagagatggcatctgttgttactcggccctgagccagctggagttctcttggcattcagggcaggcttgcccctcagatagaggatgctgtcagtctcggcctcttcctagtaaagcgccatggcacctgcttgatggtcatgaaacgatcacagcactgtctagaccactggttggtcattcttataataatgataatccattatagaaactgggtcagcaaaatgaaagaaaagtgtgtgtctcccacagctagacatgttgaagtaactgaagtctctacagagcgaggagcttctcccaggagtagcttttgaagttaccaagtggacccatgtgctgtgtgtggtctgggtagcagccctaaaagatgggagtttctcagagctatgtaataaatgaatatccactaaacaagatcaacgaagaacacacatgtataatgaatgcatatggttcccatgcattttttttttctgccctgccaacttaacctgagaagtttggagttgagcatttactgttcttgctaggataatgagaaagcgcagtcttgtaggtagatgccttagcatggtgatccatcagctctgctttgctctgccctgcatggccgtgttctcgctcattcacagattttacattgctggagtcattttcatgggtgcggctacattgagagcagagtctctcagttttagagaacccacaagctggggacatcagggagctccccctcacagcgactcccgtgtcctttacctagacgccaagagctcagttgattagcacccctttttccttatggttattattttctactttttcttcttttctccatacacagattatgtttctatagacacatacatacatacatacatgtgtgtttcccatgagttaaagtccagtggttgctttagtggttccttaccttggttccctttgaggaaaccttgactttgtttctacactgctgccggttttggttagaaccttttcagagaaataagagttaattttgaaactacctttcatgttaaagtgcttggggagtttataatagtttggtttctgattattggtctttgtactgttgtacctggatagtagtgtgcccctactagaaaaatagtcgcaggaaacaaggtagagaagaggtgggggctgttttcgctttaaaatggttgcgctcagttgggtgtggtggcccacgcctataatcccagccttcagtaggctgaggcatgagcccagggtgcatatagtaaggtgaatgggaaagatctaatgttagcttctatgaggtctcctcttgttctcctgacatcaccatatggcaaactgtcttactcctgcgcaagtctcacgtgtcagtgtcctggagatcaaggcctaggaagtgtaactagagaccaaccaggccagtgtctttggagtcctgtattttggtctcttttcctgcccatgagtgtgggtaagtgatggacagacttggcctaaggcagtactgtgtattatgtgattcaaacttattcttaaaatattttatttcttttcccccagaagaaaagccaaaaccagatccagtgttccagtctccttcgacggtccttaggctcgtactcagtggggagaagaaagagcaagcaggccagatgcctgagactgctgcaggagagcccaccccagagcctcctcggacttcatcacccaccagccttcctccacttgcccggagttcacttccttcccccatgtccgctgcccttagcagccagccactgttcactgctgaggacaagtgtgaacttccttcctccaaagaagaagatgcacctcctgtccccagccccacgtcttgcacagcagcctcaggcccttcactaacagataacagtgatatatgcaagaaaccctgtagcgtagcgcctcatgatagtcagctaatttctagtactatcctaattaatgaaatgaatggagttggtgaaaaattatcagccaaggagaacactgtgggcatgctgagacaggaagtgctgccattgactctcgagttagagattctggaacatccacaggaagaattgaaagtggaatgtacgccgactcccattgccccgtccatgctgcctgccttctccccagctcctccgactccccccacttctcctccttgtcctccggttgtcctctctgccgccattgctcgttctcccgctgttgccactgaggtccagagagtcgccgacgagggagaaagcctgagaacttgccttagcaaggatgcaaaggagatgcaggacaaagcagagtcagaatcagatgggcaagcagaagagactgcggatccccagagcctacattcaggaaggagccccgccccaggtaagctgctctgcccgtagtggtcgcacgcttgctgccgctgaggaagagccagtggtggagttattttttaattggctactttccttgacttccagaaacatcgaatgaatgctgaaattcctagtctgatttcttcagtggtgtgcttgttttttagtacagcctgcaaaagagttactccattgtctaaaatacactaaatgccgccaaggtatctgtctctctgcattgttacttttgttacttaaactcacgtcctcagccttttgctctgttgcttcgaaactagaacggaagtcagcatggtctttcacttccagccctgtcttcccagggttctaagccagccatttgtaactgagtcctggatggagaactggtcagggaaattgcacgcagagttgcaattcctcttgaagagcaaagccccctttggttagattctttaatgtctcactttttctttgaaacgtttcactttaggttggcactgatagtgtacactggtaactccagcactctggacatggaggcaggagggctcagtcactcttgaatttgagattactctttctgcaaagtgacgtccaggctatctgggctgtgtagagacagacccctgtcttggttagactgaaaagaaagtttgattttccttttacgtttttatctagtcacttctatctcgaaatttttatagtcttcctcaagtcagtttgtttttttagtaatatcacctaggatcagatgggtctgatgactagattctttttttataaattaaaaaaatttaagattaccttatgtgtatgagcgtttgcttctgtatgtgtgcgagctcgcccatgtgtgataccacatacatgcttgtgctgagaaaacaagtcagatcccctggggctagagttacacatggttgtgagctgtcatgtgggtgctaggaaatgaaccctaagtcctctgcaagagctgagtcatctctccagcatgaaattattaaattttagttcagagtttcaacagttttaacccccaagttttcctggatcttactggtctgattctttggagagcgacccagaagaagtaaacactaccttgcccggtgctgtgtagttgtctttggtacatgtagcaggtgagttgtttacaaacgaacattctccatgtgctagagaggcgtgcatttcagtatgcatcatttcccagggctgtaagcatcaggttgcctcttgtttttttcctgagagcttagctgataaactatttcataatagtgggtcaggaagtgcctcgccaagcttatagtagtcaagtcctgcttggatcttcatggggtgcatctgctacactgtttgtggccaggcaagtgtgaactattgaatggctggatctgacgactatgcagatgtgttcagagtaactactttccacagacccattggtaacgcannnnnnnnnnnnnnnnnnnngggcccccacctgggccttgcagtttcttctaccaggaccaggggtcttgggaggactctcccacccacgtgtaaatgacagctgttcctccatcattgctgatgcaggaacagtgtccaggcttctgctactgagcagggcacaagctcccaggcgcttatcgaaagcaaatacgatgccttttggaggaaaaagcttaaaagtgagaagtggtctttcctttcctgactgatggatttcactttgcctttgtggagcttgtgtccagtgctcagtaggaaaagggagcaggcacaggcggctgctgtcctctgcttctggcttcgctccccagtggacatcaccattgtatgctctttgaggtctccattcatcaggtctactacagctagcttttgggggtgttggttgaagttggcgttttttatggttgttgttttgtatttcaagactggatttctctgtgcagccctggctgtcctagaactttttaaatgttattgctgatactgggaatggtccttaaaatataagtatttgagccaatgctcttaattttagcatgattccttttttatgtttttttactttttctaagggttttgtttcacacaaattaattacattcaagctttttgaaaagcttgtttgttggttggtggttttgtttaaacaaagtctgaatactgtagcttagggtggcctggaccttgtatgtagcgtgagctagcctctaattcttcagcctcctgagagctgagattacagataggagcctccacacctgctgatttcagttttcccatgagctactgtgagataccagaccctccctctccattgagtattgacagtagcattaaacctttataagataattttaaaccaaaagataaaaaactcttagctggcttttttttaaatgactgtcacctctgcagcagtcagacatgtagaaggtttatgtgtgctcagtgctgagttctaggtatcagagccttggccttgcagagggtgaggtaggtttggggaaactgctttttctctccagtgattaaagcactttcaaaaagaaaagcttgaaacaggatctggttttgaagcttaagtcgtttgggaactcgctatgtacccagcactgagctcagggttgtgaccctcctgcctttagtattgtagcagtgctgctatgcccagcagtaagacacttgaagcaaatattcttgtatgattttactcatagtgacgaataatctttagtagattttccttaaaattttagtgcacttttgtacagatgtaatccagttgggcatattgagtgtatctgcacaactctgttgaatacatcttctttgcatactgcttccacaacgaggcctcgttataaaaacatccatatcatagtaggtaataagagttcagaccagcctgacaacactatttgaagttgttttaggaagaatactgctcaaattttaaaaatatgaatatttctgttttgacacttttaggtctatatattttcaggaagggaaaatggaaaattctataatccccttagctgttttcatgtcttataaatttaagttaacaaaacaaattttcaggctgctatacaggtgtggatggattagcaaatgttttagactgtcttgagagtactgtgttttaagtacatttgagagtgccagtgggcagccctttgtgactgaagtcgtcgtcacatcgaggattttcttgggggttctcatagattgccaatatgtgaagtgattttcagactaggtgggcttttgtttggggtttgaagtgtggcctcccgaagcccaggctggcctctggctccatctgtcgctcaggatgactttgaactcatgattttctgccatctctcccggttcttaaattggagatgtgtatcacctctcccaactcctgtggtgttaaggatggaatcctgggtgtcactcctgccaggcaagtttcacccactaatgcaccccagcctcaggggctcttgcagctgatgctgctagtggttgtaactcaaatgctgctagaaagagctcttgaggaggagtttttatcctgttcttttttgattatgcattttctttatgcttgcttttcagacattaaattccttttagggtaagtgtagagagatgcacttacttaaaagatttgtaagctgggtgtgcctgcacacacctctgggcagagtctgaccttgtctacatgcagagttctaggcctgggactgcttagggggactgcactgtaattgtcccccatacattagtctgtgctctgccctgttggttggttttctgtcttgtcaatgggtctgtcactgctgaggtctgaactggtaacaaaatgcccttcctgctggcctgctcacccctgagtagagaaacgtggggtttgaagtcactcttgagccatttgctagttcagtagtttnnnnnnnnnnnnnnnnnnnngcaatggagagtatgtctgtcagcatgcagtcgggcttgtcatgaagttacaggtcgtcgggagtcttccccccttcctgtctcaatctaagtgctcagtgtttacagtgtagtctccagatctcaggcgtcacccttgctatggagacagttgttgctcctccttttcctcatataatttgtgtgtgctaagatggacacttcccagtgtatagtcttgtatatgacctactgtcactccaccccctactctgagcttccggtgggggggtggggtggggtctggaaggttctctgacttcccactctcttcaaacctctcaggtgttaacctacacaaagggactctgttgattgttcatgatgaagaatccttggtgaagggccttagctgggttctgtccatcttacagttcataggccatcctgcagggaagtcagggcggacataaggaggcagggacatggacgagaaagctgcctactgactccctcctggcttgctcagtatttttttttctctcttatgtaatgccccataggctagtctgatagaagcattttcacagttaagggtccctcttcccaaagcctagcttgtgtcaggttaacataaaactagcgtgcatataaagttttagccctgtggtgtcatggtgtatgtgctatgtgattagatatagcttctcatggagttgactgaacccaagcaatatgttacggagagaacaggtctgttctcatgcctgtgccgtgtgtttcagtaattgaaataggattctttttataacgtgtatcttctcaacgtgtgtctgctgagcagtctgtcagtagttgagtaatactatctttcccttatagtaaggacctcatttttacaaaactggggctggagagatggctcggtggctgaatttgggcgctctggaagagcagtcagtgtagtagtagttaaagcttccccttaacaccaccaataagtggtgacatcagtgaggaaaacggatggacagacagcagcagtcctcatgctcctgccacctgggagaggtctctgactgccccttccagtgtgtgcagccccgtcccttgtatgtttcttgccattgttgagcccttgagctccccctgctcagctccctcttcagtctttttgtcttacatgaatgtnnnnnnnnnnnnnnnnnnnnataaactatttcataatagtgggtcaggaagtgcctcgccaagcttctagtagtcaagtcctgcttggatcttcatggggtgcatctgctacactgtttgtggccaggcaagtgtgaactattgaatggctggatctgacgactatgcagatgtgttcagagtaacctctttccacagacccattggtaacgcacgttcttccagacagcctgttgaattgtccctatctaaagccctggttttcccttgcacaccgaagccttgagtactgcttctaaggccttgaaaatacacatcctggggctggtgagatggctcagtgggtaagagcacccgactgctcttccgaaggtctggagttcaaatcccagcacccacatggtggctcacaaccatctgtaacaagatctgacgccctcttctggagtgtctgaagacagctacagtgtacttacatataataaataaataaatctttaaaaaaaaaaaaaaaaaaaaaggaaattacacatcctttcctaactagtgcaaggaaatgagcgtacatctttcgttagttttttcaagacttattcttggtcatgaataggaattgagagtcatttcatgttcatcagttgtgtgtggtggttaaaagaagccgatgtggtggtacatgtttgtaatccccaaagtcaggaggctgatacaagtaggtagctactagtcagagctcggcctggggtatggagcaagttctcagtcagttagggcttgttatgttaacaagaccctgcctgcctcaaaacaaaacagaaccaagaaatggcgtgagggatcatctcatagagaccacaatcttttgaggctgtttttacaggagtctgagtgtatgtattggagacatctcaactatattctaggctaatgtggagatcactatgtagctcaggctggcctctaactcacagaaatcttcctggctgcgatcgcagaagtgagtctccacacctcttaatgaatcttttcactcattgccacggcagctgtcaactgtctgggcaatggagagtatgtctgtcagcgtgcagtcgggctcgtcatgaagttacaggtcgtcgnnnnnnnnnnnnnnnnnnnntactctgagcttccggtggggggggggtggggtctggatggttctctgacttcccactctcttcaaacctctcaggtgttaacctacacaaagggactctgttgattgttcatgatgaagaatccttggtgaagggccttagctgggttctgtccatcttacagttcataggccatcctgcagggaagtcagggcggacataaggaggcagggacatggacgagaaagctgcctactgactccctcctggcttgctcagtattttttttttctctcttatgtaatgccccataggctagtctgatagaagcattttcacagttaagggtccctcttcccaaagcctagcttgtgtcaggttaacataaaactagcgtgcatataaagttagccctgtggtgccgtggtgtatgtgctatgtgattagatatagcttctcatggagttgactgaacccaagcaatacgttacggagaagaaacaggtctgttctcatgcctgtgccgtgtgtttcagtaattgaaataggattctttttataacatgtgtatcttctcaacgtgtgtctgctgagcagtctgtcagtagttgagtaatactatctttcccttatagtaaggacctcatttttacaaaactggggctggagagatggctcggtggctgaatttgggcgctctggaagagcagtcagtgtagtagtagttaaagcttccccttaacaccaccaataagtggtgacatcagtgaggaaaatggagggacagacagcagcagtcctcatgctcctgccacctgggagaggtctctgagtgccccttccagtgtgtgcagccccgtccttgtatgttcttgccattgttgagcccttgagctccccctactcagctccctacttcagtctttctgtcttacatgaatgtgtctgttcatgatgcatgtattcaacatgccttcctgaaaatatgctatcttatatctcaggaactgagaacctgggtccagactttttttttttcttttttttnnnnnnnnnnnnnnnnnnnnnnnnnnnnnnnnnnnnnnnnnnnnnnnnnnnnnnnnnnnnnnnnnnnnnnnnnnnnnnnnnnnnnnnnnnnnnnnnnnnnnnnnnnnnnnnnnnnnnnnnnnnnnnnnnnnnnnnnnnnnnnnnnnnnnnnnnnnnnnnnnnnnnnnnnnnnnnnnnnnnnnnnnnnnnnnnnnnnnnnnnnnnnnnnnnnnnnnnnnnnnnnnnnnnnnnnnnnnnnnnnnnnnnnnnnnnnnnnnnnnnnnnnnnnnnnnnnnnnnnnnnnnnnnnnnnnnnnnnnnnnnnnnnnnnnnnnnnnnnnnnnnnnnnnnnnnnnnnnnnnnnnnnnnnnnnnnnnnnnnnnnnnnnnnnnnnnnnnnnnnnnnnnnnnnnnnnnnnnnnnnnnnnnnnnnnnnnnnnnnnnnnnnnnnnnnnnnnnnnnnnnnnnnnnnnnnnnnnnnnnnnnnnnnnnnnnnnnnnnnnnnnnnnnnnnnnnnnnnnnnnnnnnnnnnnnnnnnnnnnnnnnnnnnnnnnnnnnnnnnnnnnnnnnnnnnnnnnnnnnnnnnnnnnnnnnnnnnnnnnnnnnnnnntgtgatagaaatactctataatagacattaacccctggggggaggggagaaggtgggatgtgatgggaataccctataatagacattaacccctggtgggagggtgggatgtgatggaaatactctgtaatagacattaacccctggggggagggaagagggtgggatgtgatggaaataccctataatagacattaacccctggggggaggggagagggtgggatgtgatggaaatactctataatagacattaacccctggggggaggggagagggtgggatgtgatggaaataccctataatagacgttaacccctagcttgtgccaataaaacatgtcagccttggttattttgaattctttcagaggctcaggcagttcaaggcctacatagtgggttccaggacaaccagagctgcacagtgacaccctgtctcaaaatgaccctcccatcccccccaaaaaaacagtttacaaaaacagatattaggagttaagtcagatgggatttcagagccgccctatgtcagccctgagtgcccagcttccgttgatttcccacccacgtgtcctgtgcacactactgagcacactgggaagggagtcaagcacaggcacccccacacaatgctgcctagggacgttaccccatgtgacacgacagcagccactcttccagaacggctgtgttgtcatcatctttaacgtcgaccttgaacaggatttgaatggactgcagagtaagaactgctgagattatttcatgactgaatcacagtcttcagttttatgaatggggagaatttaagtattcctcacagagttgtcggttttcttggtttggttttgttttggctggggttaggcactcgggtctgaagctggagcgccgtgtgtggtactcacattggagcctgcttaccacctcgctgctttgtataattgttctgacatgtctctattcttagttgtacatatatttctaggtttattatgtctgtgaggagagggaaggaaagatggtgaatgagagtgagagatcagaggacagcccttctctccttccactgtgggttcaggcagtgaattaaaatctgcaggccttcacaaccactgttccctcaaggccaaatatttggttgcagaaaatgttttctttcttagtttgagaaacatttgagcaataccattgacagtaagtggcactcacattctctgcaggtctgattgagaaagtgcagccttcctggctaccatgtcctttactaggtgttgggaccaaacctggagtgtcctgtgcgagcagtcctctgctgtcgtgaattatgcctccagcccctgtatttatttttaagtaaattagaatacccctttgatgtctcttctcaaccatagtttaggaccaggaaaataatcaaattttatactatcacaaacctccaagaatcctggtggcctaactggtgttattagagccacactcatgtctccttttagagtatctgggatgaaattcaatagtgatctgatctcatttgttctgatgactttcatttgcacttcccatattatgtatcttcagacctttgaatgcagaagtgactgaagtgcctttccgctgagggtttccatagagacaggtgtgtaactcctgggatgggcaaggtgaagagctatgggactgggagctccacgctggcctgccgagattgtgtaggtcaccttgagtaaagtctgtcagcctgcacattgtcggccccaggtgtggactcaggagtagaaagggtggctttccgtctgggtttctgaattcatggtgcccatgtcactcagagatgaagagcatcatagagggccactgaccatgtgtactgcgggctccgggttacaagctggggctgtagtaacccatgcctctgcatctgtaccatgtttaccttgaagtaaacggcagtcaacatgatagtaagaggagcactgagaggcttgttaaattcgaacccacctgagcagctccccgggagctgggagagcatgctcacgggctcgctgcagggacctgccttctcactgagggcagaggttcccaatggcttgctcttccctgatgacattgacatacatgccgtgagccaacagacacactgctcacactgtcctcctgtgtgggttccatatcccaccttctcccgataagagatcggggtggaaatggagctggagttccgaggaaggagcacagggacagagccacactgtgaagtggggacagcgacgcttgggtagttaagctctggcctttacctccagaactatgctctgttattagtaaacgtcctagttctaacatagggacaaagtctcaacccttctgccctgagatgaatttttgatctttcctgggatttcagtaagcccctgctgttgtctagggtactgtattaaatttaatcagtaagatcaaaccctttcccctgcccaaaaggcttaaactcacagcacacttagccttgcagttaagcctttgtatagaatagcaaggatataatgaaatgtggggaccatttttggcgcaatagagcaggaaatggacctgatgctgacccaaaaatagaagctaaattttcagccattgtgcctcggcagaaaatgaagcaatgaagcatcttgaagaggggcgccaaagtgcagcggcctaatggtttcactgtcaaggaagtcctgactgcttaggactatgggagtcttacacaagagtacagtcaactgaaattgttacgtaaaatcgtccagaataaagcagaactcagtgctgataggaatgtaggccgagagagtcttcggtattctccgctgcaaatggcctgaggatggaggtaaatggacttaagcttttggtcaaattctgactctgtggtggtgtctgtgctgccacctgacaggcactagagtgctctgacaggggacactcatcggccagctagtctactcatgctgcagtcaagtgtgtgtaatgactggagctgttctgatgccatggcctgggccaaacagctggattctaagctgagctctgggaacccccagattctaagctgagctctgggaacccccagattctaagctgagctctgggaacccccagattctaagctgagcttgtgtgaagaggctgccgccaccgccaccgccaccgccaccactgccgcctagctggtgctgcttttcagctctcaagaggcccagtgagtccttcctcctgttttctgaccatgggccagtagccgcctttatttttcttctgtggctttggtctgtatggtcttggagttgagtccacgaacctcttattctaggtcaaaattacattacctcttttggcctttctctatatttgctttataaataaattgtcctaaacaagtttatcagaggaaaattagattgttctcttcataaatttgctttctctctgtaaatgagtgcattaggagtttcttatggagtaatgattttcctacaaaacttaaactgcccagtacattggtcacattttcaagttccctcaaatataaaccacatacattttcatcaccgtatctgttccagaaactagatagcccagaaggcctgattgcaggaacagcaggaagctgagctgttaggatggatcttaagatggcagctgtgacagatagcacaaggcactgtagattgacagatgctgaagcagcactccagggagcaaacaggagtttgccacaggacactcgctctgtcatcgcatccttaagtgcaggtcagggcttcacggccacatggagggacaaggaaaccggagtctgaccaccgtgtttccgtcagaacggaggacagtaaaagagaatctgattggtctgcaggaagacctgacccttgtcaactcctgataaagacttgtgtgcttagaattctaattcagttatcattaaaagttatcttaactcaaagaaaattattttacaaaggctggggaaatggctcagcaggtaaaagggcttgcagcttaaactgatgacctgagctgatccccagaacccacataaaggtgctgagagagagccacaaaactgaccgtgacctctgagtgcgcgtgcgcacgtgtacgcgcacacacacactctctctctctctctctctctctctctctctctctctctctctctctctctcataaataagttaaagtgacttttgaaagttattgacttttccttcttggaaatgggtacacatttctgtgggcaagcctcagggagcctacatttgttgcctgtctgtggggttggtttcttcttttcttttctgtggaccttaataatctgctgtccattcattaacaaaaattaggggaaatatacttggtggttttttgtttttggtgtgtgtgatttcatttttgaaccagctatctcacatatagctctgtctggcctggaacttgctttgtaaaacaagcgtagctttgaactcacagagatacggctgtccctgcctcccagtcctgggattaacagagctcaccatcagctattaactaatgtccttgcactcggggctctacctgaaagttaattcatagggannnnnnnnnnnnnnnnnnnnnnnnnnnnnnnnnnnnnnnnnnnnnnnnnnnnnnnnnnnnnnnnnnnnnnnnnnnnnnnnnnnnnnnnnnnnnnnnnnnnnnnnnnnnnnnnnnnnnnnnnnnnnnnnnnnnnnnnnnnnnnnnnnnnnnnnntatagtagcttaccttctgggtagtgtgggcttctgggcttctgagcagatcacttcatggcctgagctggcactggacttgttctcatcagcctcctaaatgctgccatagccactcctgactttcccaatcgcgcctttgatcccagtactcgagagggagaggcaggtggatcttccaggacagccaccagggctacgcacacacacacacgcacacgattcattacctacccagaatttctactagatgaggagaaatgcaagccaagacaagaatcaatagaggagatagttaactgacatattccataagggaaaagcatagcatatttcatagtcataaaagtaggaaaaggtcactctgcgtgtgtgtgtgtgtgtgtgtgtgtgcgcgctcgtgcacgcgtgtctgtctgtctaggcaaggtatctctgtagccttgactatcctggaacttctgcagacctctagctcacaaacccaccttcctttgccttcagagtgctgagattaaagacatgcctagccccctcactttctgatatttttagtcaataatctaataaatacattcttgaacacctgcaagaatagaagtgcaagaagtctcgtgtaaaatggaatgtaagcttaccttttgggaagctcaattgggcagtatttagcagaatgcatacatgaaagggatgaggtgtgtttagctttgttggagtgttcagaggccaggagagagcaccaaatcccagagctagagttgcaggcagttgtgggatgcctggcccagtatgcgggtgctccctccgttctgcaggtttgtgagagcaggcactcttaacctcctgggccatagctccgccccaggaggagtttccttaacaaataaggcgaaagggacgcatctgcccagctagcctgtgcagtgtacagatgggtgagtgtgcctgtctgctctgatgatccataggacttttgcagacgaagttcacggtgggggttgggggtggggggcttagttgggatgggccattaggtttcaattgtttgttctagttgacatttgtgtcttggaactcattacttggtgcacagactttttcttttcataaaaaggaatgctgtgtacatgtgtatatcataaagcatctaatatctgagcatgctgttagcgtgcatgagtgcagtgttctcccagcacgccaagtcgctgaacatcacaacagacaactacacacgttttcagtaaatgttctcagctgtctcctcatgtgatagcagcagtcgactgcccagatcatgggcatatttattacctcacagagaagtagctcagcagttaagagggcttgctgcttttccagaaaatctgagtttggatcccaaacaagaaagaagcccggtaccccacaaatgcctgtaactccagctccaggggaccaaaccatctcttctgctctctgcaggcactgcacacacatggcacacacagtatgcacataaataaaaagctgctttattgttcatcaatccctgcttgctgttttacaggcatctagacctcaccaccgttctcctgccttctcaccacagttccttgccagccaggccccttctcacatctccctcagttctcctgcttcctctacttaaaaaggcctttttttttttttaaatccattggtgttttgcgtacgtatgtgagtatgtgtgtgtgcatattggattccctggaaatgccacgtgggaactcaggtcctctagaagagtagtagccagggctcttaacaactgaactgtgccctcccccccccactcccaaccccaaaaggccttttgattacatggtgtctagtttcctattcatccaaagatacttcattttaccacataatcaagggcactttgccacacaaaggtttgagtcataggggtcaatgtcatatgaacattttgggcgaagatttattgtgcatagcacactgcaaaggtgatattaatatggaaatttaaaccactaattgaatatattgttaaagtatcttcattctgttggcctcagcatccaccttcagaaacaattaaaagaaaagtaaattaaactcaaatgatgggggaaattacgctaagattagaagtaaaatgtaaactgaaggccgttagtgcaagtaccaaccgagctccctcggatgccatcgctccgacagccctgtgagcagtaacggtgaagcaacgagagaaaactcagtgtgcttacttggctgcttttgggagagcagaagtcctgcctttcagccgagtccggtagcttcttctctctgtctttcccagtgatccatcatccgtgcgtcgacgtcgtcggcctggttctctggcctgattctcgaggctcattcatggcttcactgtgtgtgtggttgatttggttggtggtttggggggcttgttggttttgtttggttttggtaaggtcttaccttgtagccctggttgtcgtggaatttgctgtgttgaccaggccagcctagaacttgcagccagccatctgcctctgcccctcgagtactggaatcaaaggtgcgcaccgtcgccccacagactccattgtagttctcttctctcagcttttccttgtttcctagagaaattgacagcttttcttttctagattcctatgggaatttctaaagtgaaaaaaacaaaatgtcaagggtgtgtccgcagccaaaaggaacccagtcgaggcctgggaatgtgaggacgctggtatagtgccaactgaagggcaggggctgagaagagacctcatgtgaacagaagccctgtgggaagaggagggggaagcccagctgtctagggtgggaactcccagagaattccattactggaacattctactctgtttatgtataagcctgtgacaatgcccttggtcccacctcagccgtggtaaagcacataacacagttttgtgtcacttgggtcctgagccctggactctgtgcacactgtcttcaaactggaggatcagtcacagagtccgcagtgatttgaaaggaagaaaaggggcctcttgtaattcatactttctccgctggcagccgtactctcttcattctcattatcagattgtggcgaaaaagtaaaatctcttcacaatctaaaaaaattcccagaaatacagaaaagcagcaaaaacagttttatcattgaacaaacataagtgctggaccgagaccctcgggcagcctggactcgagagggccaagttgccgagaactgcagctctgccttcctctccaatcctcgactgaaaggcaaggacaggctgggtgtcctcctagcgcctcaatccctctgcttgtgtctatggaaggagtgaatatgaataaaaaatcagtttgacgttgtggcttcttattccatcctgtgccgatagcaattggctggaattaccgtcagtggtaacagcagtagcggcggttggctttttgcaacaagccttttctgtgtagtccaccatggctttgaattccctgggtccacgctggtcttaaacatgaaattctactaccacagcttccacgtgccatacccctaaactgtatttcttctgtcttcagccgtcttgtcatgttccaacctagttcatctgaacttctggaaggttcagcagctgtcagttgcttttattctaatgaaaagcagaatctgggtctttatgacaggcaggcaggtagttactagagccaggctccttcctgcatgaagagtcccattgtgacaagagagacggtggagctatggaggcagcctctggctctgagttacagggttgataaaaatacacctcccagggatggagatgtagcatgggttctctagggcagtgcagacacgtgactgcctgtagctgcaggcggagactgttgaggttctaggacctgccactcagtggcttggataaaccctgccaggcttgttgtgggtgtgaaattgcaaacctgttggattttatattactttggacttccataggctagtcaaacattttattctgttcttactttttacattttgcttattttgtgtgagtgtgcaacacgctgtatgtggctgtcaggacatagcttgtgagagaatgtgttcttccaccttgtgggacctaagaattgaactctggtgtaaacgtaagttttttttttttttttaagatttatttatatgagtacactatagctgtcttcagacgcaccagaagagggcgtcagatctcattacaggtagttgtgagctaccatgtgtttgctgggaattgaactcagtacctctggaagagcagtcagtgttcttaactgctgagccatctctccaggcccataaacgtaatttttattagcctgatataattgtcctcgctgaggcttactgcctccatttgctaacctaggcctagtcccgggagcttctagcctctgtacaattttatccagatctagagtggtccagcctcggacacttcctgctgataagctcaccctttctacttctttttgatatctgttgactgcttaaactcagctcttgtggctcaaactcctctgcaagctgactggttcaatctggcttctctctcagcctctgactgagttgctctgcttgacctcatactaactttggcaatgtgatctaatcttctggctccttctcgttttctggtttggtctgtcttcaccctgtctctgcacaactgccctgacaaactgcctcctttctcctttttgcaccctccctcagatagcttccctttcttctctcatgagagtcgggcagatcctattctgtcaaatctttctctgattcatcacttgtgtgtgctgctcaattagacatgggtgcttctttctacaaagtaactttcccttcattgtttgggtgtatactaagggcatctgtattccagccagagggattaaaggtgtgtgctaagggcaccacaactagaaatagtgcttttcagtaactaacacaacctcacagtgtgatcagtcttgcaacattataatcttcagatacccccagaagagggtgtcagatctcattatggatggttgtgagccaccatgtggttgctgatatttgaactcgggacctttggaagagcagtcagtgctcttaacctctgagccatctcttcagccctggtcatctgcttcttaaatggtcttaattgaatggctcgaatccttagttttgtcccattagcatttttatgggttttactatttagtttaagtttaaattatgtttttaagtttttaattttaagtttcagttatgtctgtcatagagaaaagttacttccccaccaatagaatgttaatatgaactttacagtttaacaacatttagtggagtggatatgtaggaaattcagtagttcggtttgcacaagggggctggagagatggctcagcggttaagagcactgctctttcagaggtcctgagttcaattcccagcaaccacatggtgtcttacaaccatctgtaattagatctgatttcctcttctggtgtctgaagagagcgacagtgtactcacatacataaaacagatctttttttttttttttttaaagtttgcacaaaaagactagtacagtaatgatttagattcttgtttaaaattcaggtaaaaataacccaactgtaacataaacatgaaatatatatgtagctgttattttaaatattaaaatgaaaattggccaaaatgtctgtgatatttcaggctaagatggcttccagctgtctgttccagcacagctggctaccatagtatgatctgctccagtccacgctccgctcctttgagcggtttgcctcccagctcttgtccgacagtttgagaagttcgtgctgtgaaatgaagttggtggtgggatttcctcccgattagttctgactcatttggaagtggaatttggacaagtttggagacgctgcagaatcctccaagcagtgtttagagagggctgtttccatgttagcggagaaagtcggagcatgggtgttctagctttggtgaaggaggaaaactggagaaatgtatggcttcaaaatggttttacaagccccgagatgcgggtcttattcaaaggttcagtctgttagagcaagtttccaggcggcttagctgactagagtgagaactaggagctaaagccatgctggattccagagcttagagagcaagagccagagattggatcctcacagcaaaaccagagccaggccttctctgcacttgaaatgcagcggcaggcagacgtttgaaacctcagggccagcctgatctacacagagagttctaagccaactagaggtacatagtgtgagcctgtttacggggtggagaggaaggaagctgaccaagaagccaaatcctttctactgagacgatgggaaggtgtcacagggcgtgcaacggtttgcccgactcacctgacgcaattcaagacagttgttcgagtacttgacgcaccccgtggctctgactgatccttcgtggtgtttcccacacaccatgccatgccagtgtctgcttcaggtgctgggcacagctacaggaaggatggagctttgctctggcgattcccagctaagtgtctacgttgagtctcaaaatagacttggagctattgctgctttggtgatgcgtggatgggctttccatgtgtgatgtccatgcactgggaggtgtatctgtgggacggtgacaggtagtgggcctgaggtgctgggtatcctgagcttggtttgccggagaagtacctagaagaggagggaagcggggcaggagagatggctcagcagttgggagcactgactgctcttccaaaggtcctgagttcaattcccagcaaccacctggtggctcacaaccatctgtaatgagatcagatgccctcttctggtgtttctgaagacagctacagtgtactcatataaataaaataaatctttaaaaaaaaaaaaaaataagagtagggaagcatgctggcgggttttcctttgaggatgtacaagagagaattacctattcctgataacatttgccctgtgtgcacctgacagtaagcaggggccatgatggaacaaagaggaacgaagaggcagccaggacaggcacacgccctgtgcccctgtgccctgggcggctgtgcccctgtgcccctgtgccctgggcggctgtgttttgtgagagaaatttcttgctctccctgccctctgtcataaagcccagacccagcacctacatggtggctaacagtctttttttttttttcaacttgaatttcgtgggatcaggtgccctctttaggcctccacagaaactaggcacacacagagtaattacagacatacatgcaggcaaaacactcatacataaaaatggaaatagattttaaaaagagaaaaagaaaaaaaaaactaaacacgaaccaaaataactcctctttcaaaccattttgctctggtatttggtcatgtcaggtgaactgcctgacgtgatccgagaactgaaaggcacaggtcagctatctgaagccaggattccttcctctaaagacaagacttgacttcacctgagagctccttgggatggggatgtgccaggcttttttttttactcttcgccagatctatgagagagccaccattatacagtctttcttaatggcttttggggaaagtcattaatcatgaacgggaggccaggcatggtggaggataggtagacccaggttactgtcagctgttcagaaaggtcaaggctagctcagctgcatcagactgcctcaaggtaataacagtaatagtgaagtgtgggtctaataacagtcaacaaattatggatttttgttgttacccagcccttgattccaaacccagtggttatctcctaggttttaagaagttaggtaattttttttttttttggttttgttttgttttgctttttgagatgatatctactatatagggttgatggcctagaaatcaccatggagacaggctggcctcacacagagatctgccttcagagtgctgggactagagcactatacaacacagggctaagacagttattgctgcaacagtagcagcttggctctagtcaagccaagaagagaagtaaactaaagctgcctctatgcacccacaagcctgttctctggcttccataggtaccaggaagccgagtgtactgtactgctttgacccattcagtgtgacacaacattatagagtctgaagtctatgtctggttgtgagttaagtgtgggagagcgctagacttgatgcagcctctgacttatattcaaagcctccagagccttccaaaaacccattgattagttcctttattccatggagttttctgtaggcatgccaatgaattacttcacgaaaagagctccggagaggagagagtgggtttcctttgaccacatcacagtttccagaagcataaaatgatgacgtgcaggttgcttgtgtttgctgttttctgttattgattatgtacacctgtagaaatgtctctcataggcagcagctggggatctcccagctcctagactaggagcgccagctttcccttgccatatcccagaatatcccggtgcagctcttctccacagatcttctgttgctcagccgggcttgttgagcatccgccccgcagaggtctagcagagcagcagcctgcaatggtgtttaactgtagagctaccttcaccccagttcagtgtcctgtgctcagtctgtgtcttctcctctctttgaacttcttttccttcatagctaattgcttctcacttccattttgttcccatcccagctcatgcaaaatggactccacccaccagtcagggtaaaagagggccagtcctgaggtgtatctcttacagggatgtaagttctttctttcattcacctcccagctccactgaagagatgctctccctcaggcagaccacagacagtagctgactgtggtccctgaagaaagaaggataaagataaattggcttgaggtttgtgatcacagatctatagtgtttgtggcatttctgtgatggtgaattaatttttgagagctttgaatgtcccttccttttccttgtcccctaaagagtttgtgtgctaacagtcttctgctctggtcttgcatattctggttatgtttttgttacgtggccttccttgattctcccgcccatcttccagccacttctgtcctatctgatggccacaggctgccttgtgtagtgtccctatgtgatggccacaggctgccttgtctagtgtccctctaacgtttgctgcttacccttgacacttaaactgtagatatatcatagatttcatatccacggattgactaattctgggagatctgtaagtcggatgactacttttaaatctttttggctgagttcctctgcatcaccaccaccaccaccaccaaaaacaaggcctttttgaactcagtcttccatttaaaattttgatccaatgaaatctacggaaaaattaacttttgtcagttttccccagtaccatggaatccttggccactggtgttgatgttaactgaaggtgggcattggtcctaaccgcctgccctagaaaaccttacagagggcttttggagcctgatcctgaacaaaatcttgtcttagctaacctcatgcttaaacttcatagttggcctcagcaggggattaagaagtgtccctggggctgcagagatggctcagtcaagagcattgagtgttcttccacacgtcctgagttcaagtcccagcaagcacatggtggctcacaaccatctgtaatgggatctgatgccctcttctggtgtgtctgaagacagctaagtgtactcacatacataaaataagtaaataaatctttaaaaaaaccaaaagttttaagaagtgtccctggttaagacgacactgttgcctggtaggaccagacccaggcttggacttctctcccacaccagtctgtgctgtcctagtctgatgcgctggcaaccccagggtttccagtctggaaatgcatgtgcaggtgaatcaggagctctcaactctgaatttggggactgagaatggtgacataaacctttagtcccagcggtcaggaggcagaggcaggtggatcactccgagttcaaggccaacccactctccatagagttccaggccagtcagtgcttcgtattaagatcttacgtcaaaagtcgtccgccgaacaaaactgtagattctggctgtttagatgagggatgctgtgtctcttctgagtcacacgccaggttctttgtgccacactggagtaaccaggctgccggtgcacatctgagtttgcggctagcacacttacctttttggcagtagctggactgctaatgaaagtgttcccatggctttcgtttgactcctggctgcaggtgaatttctgtgctgctgggctagaatgcaaagatgttttagatctactaatccccagcaggagtgcagaggtaagtaaaaggactggtcttgtatttcagtgcaaacagctaccactgcgccaaagtcctggaagaaaacaaaagagcagacccgaaccccagatgaagtgttagaagcagaggcagaggtgagtgaccgtctctcctgagacacctttcttaagtaacattttccattccgatcttggtctgtcaagcacagactatgtctacgggttttgtttgtttggtgttttattttcctgaataattgttgctcctctttccaaatacctcttctagatagtcaatgtgtgtagttaattctacctacttgaaagtgtgtgtgtgtaggggggttatttttggctttatttgttatgtgatatttctatattggtatggatttatgtatccagttatatgcatgtgcattgggtgtgtataaaccggaggtcaatgttgtgtgtcttcctctgtcattgtcaactataattttgagaccatcatcactagttgctaaccctggagattagttagtatgttggttggtgaactctagggatatgcctggctccttcttgagttctggggacccaaagtcaagtagttctttacatcttgcacgtagtcatacactttaccaacaggctacactcagtcccttagctcccactttcttatactttcctgaaagtacgataaaaatgacattaaaatagagctattattttgggcatgctgtactttgctaatgggtaaaggaaaaggattgcttacaacttgggcctgaactgggaagagaaagtctcagccttggagaatttttcagttctccattgaggcagttttatttatttgtgtttgtgtgactgcacttatgccgtggctcatgtgtcaaaaaacatcccgtggagtcatttcttcccttctgccttcatgtggatcctggggatccagctcaccccatcagctttcaaggtaaacattatctagtgagccatgctgcctacggcagatttgaaatcagtttctgatgagctctttcgagctaataaaaacttgtgtgttgttcacttgtctaacagtatcttttgttgcttcctctgtcacgtcattttccttccatgatgctctgttgatgtcacagtagttgcctagcaaccactaaagaggtgtgtgagtgtgacttcattgtgcttctgagggacaagatttagcactaagtttgagaggtgcacgtagtcggtgcctaccttgaagcttgacaagaagatgatgttcctacagagaataagatgcttcctagaggcaggggagtcgcacacagtccgggtatggctcgctcttcacaagtagatcctgttgagactcggctgggtttgctccattcactttagtttccttgttgtcttttgtgctctgaccccatttctcagagaatactgaatggatggagcacccaccattcctgtgcccttccttagtgtggaggtctccagacctgatcatttcaggttgggatagtacatacttgaagtctgttgttcctcccacaactcctcaggcctggcacaggaggcctgtctgtgggggaagtgtggctgtgtcccagtaaccttattgatggccactgacatttgaatttgcatataaaaaaccacatatctttattgtttattatttattttggtttttcagttattgcaaggataaaaattatccttaacttgtccaattcatgaaagcagttggtaaagcaggaccctgccttttttttgctgtaaccctgttgtagcgtcatgaggctgtgagagatgatgagattccatgtgaagcagccactgccctacgtaccacacattgtataaaaagcttacgtagcaaggccaggaaggtggccacatgagtcggggtggctgctcctcacagcacctacacaaggcccctagcacccacagtgggcggttcttagccacctagaacttcggtcctaggggatctgctgacgtctggcctccgtgggcactgcactaatgtgaaaatgtgcacacataaatgatatatttttacaatacttaaactattttctcttttttatgtagtcttcactcagaattcttagttctgagccttccctacaataatgctcattagcacagtttattgaatactagatacttttgccctaatttccactatggtctctttcctactttattttctcagcctttaaaaataatgcaatttgggcacatcagtggtcaagtgtgcctttaatcccaacactcaggaggcagaggctagtgggtctctgagtttgagccagcctaatctacagaggcacttccaggacagccagggctctacatagaattcctgtcttgaaaaacgatggatggatggatggatggatggatggacggacggacggacggacggacggacggacggacagacagacagacagacagataatgttcagtccttttcgtcagtcgctggatacccgcttttcattctgacttttctgtgattggtagggagtattaataatagtgttataaataatattagtgacagtgttataatgtattcttttttaaagttttttatgattcatttatgtgcattggtgttttgcctacatgtgtgtctgtgtaagggtgcgaaaacccggagagctgaagttgcagacagttgtgagctgccatgaggatgctgggaattgaatctggtcctctggaagagcagcctttcctcccttccaccccatcctccaccctcccgagtttcttttatagccctggctatctatcctagaactcactttgtggaccaggctagccttgaactcatagagatctgtctgcctgcctctgcctcccgagtgctgggattaagaggatgcaccgtctctgcccggcccataatgctgttattttgtctggtttattttttctctctccctttcttaggggtagccctggctgccctggaattctctctgtcaaccatgctggctttgactgcgcaatgatgcagctcagccctgctgcatccgatttgggaataaacggttgagttagcactgttcgtagacttcatgaactccgttttgcttgttgagtttttattgggttgagtcttgtggcattctgtggctctcctcagtgattctgtgtggctatgctccccacaggcaccctgtgcttcctagtgtcacctttctttctttccctgttggttccctgctgctggttttaggaaatggcttcacccccacattttgcaaggtctgaaggaaggattttaagaactgtgatgcgcttatttagctctttagtgctgtaggggctttggctcttctgggtgtcctgaggtaccatggtccttcctgctgaaatctgtgaagtcaagaaaaactgtcctcacccatctgctctgaatagaaaagcgcacatccagtccttgtcagtttactcagagcatcctggatgctgggtccaggaaccgcaggccagcctctcagcggccttacccagtcttcttttaccaaacgttgaaagcagcctacttttctttaatatatatacatatattatatatttatatttctaggctttattcttggaatttgatgtcagcatttgaaggttttgcttgccttttttattttattttatttctttaaatttgagacgatgtctcatgtatcccaggctagtcctcaagtggctatacatgcttatctgctactgattttagaaaatttgctatgtagcctcggatggccttgaatttcgtgtgtgtgtgttgtatacacatacaagggtcattcagtagggtttggttcttttcttctcctgccttgtcatctggagagcaaatcaggttttgcaataagtacttacctttgctcatggccacaccctgcctgtctgctgtgtcagcttttactttgttgcgttggccctcggcttgtatagaagcagattgcatgtgaccagtctgtctagcccagactcaaacttctaacccttctgctccctcctccctcgggctgaaatttttggcctgagtggtttctttgattaaatattaggggatttttccatctttcttcctcttatatgtcgcttagaattaaacccaaagcttggtcataggatgaccacctgttagctctataacggttgccttgtttttcttttttgatagcttgtgtgtgtgtgtgtgtgtgtgtgtgtgcgcgcgcgctaggatcataggtttaggtctctggattgcgcgtatctacttgtaagactttaaaatttgtgtcttgttatctgatgtattgtaggaacacattgctcgtatttttacatgttaaagaagatatgtttgagattacaaaactgtgtcataaatggggtaaggtaaagcttgctatgtgcaggacagacttcgcacaagactgtagcgtggtgctctgctgcattcgcgcactctgcctcacctgatccacattaaaatgctcgagtgccgtggatgtcccatggtgctggttgggtaggctcgtcttcagagtgtcccctcagcagacacactttattcacagagaacccagatgcacacccaggccttcaacatcccacatagctaggaggtgattccgtgtctccaagagacagtgctgtgaggagcttttttgtaagtgatttatgtgtgtttctcatacacggtcatggtttcagtcaagttaatagattaatgcaaagaggaactgtggtctccttgtaaagtagaacatgattatcatcgtaagacttttaattctttaattccccgaaactctgtttcaaagctggaggcctgcaggcctctgtagtctagcacctcttgcttgctgaccagctgtgtggcacggtcatgatggctcagggttctgagcaggactacacactcacttcttggccatcttctttcaagaactagctgtcctttgctgcgtgtacatagtagcgtgaggtagatggatccatgagttccagcctggtctacacagttgagttctagggcagccgggattacacaaagaaaccctgaaagacagagcagtgttttcatgctaaccttggctacattgagactccattcgtcacaggtgagtgccttccagtagctgtctgaaccctgtgtcacgtggcaggcggggagatgatttaaaacttgttgttctcgtgccatgtgctgagtgcagacgctgtcatcttgagtggcatgctttgagtgtatattgcatacagtatacaatatttatgttgtaatgtgaggtccatctttccttgcactctagcctaaagccgaagaagagcttgcagttgacagtgtccttgagcctgagcaagagaagatgagccaagggtttccgtctgagagagacccctctgccctgaagagagggaaagctgaggaaggaaacggagaagaggctgagcctgtgcgcaatggcgctgagagtgcttctgagggggaagggggagatggcaactcaggctctgccgacagctctgctgatgggctcaccttcccgtttaaagcaggtaagcgagctgtccctggcttcccgtgtcccttcnnnnnnnnnnnnnnnnnnnnnnnnnnnnnnnnnnnnnnnnnnnnnnnnnnnnnnnnnnnnnnnnnnnnnnnnnnnnnnnnnnnnnnnnnnnnnnnnnnnnnnnnnnnnnnnnnnnnnnnnnnnnnnnnnnnnnnnnnnnnnnnnnnnnnnnnnnnnnnnnnnnnnnnnnnnnnnnnnnnnnnnnnnnnnnnnnnnnnnnnnnnnnnnnnnnnnnnnnnnnnnnnnnnnnnnnnnnnnnnnnnnnnnnnnnnnnnnnnnnnnnnnnnnnnnnnnnnnnnnnnnnnnnnnnnnnnnnnnnnnnnnnnnnnnnnnnnnnnnnnnnnnnnnnnnnnnnnnnnnnnnnnnnnnnnnnnnnnnnnnnnnnnnnnnnnnnnnnnnnnnnnnnnnnnnnnnnnnnnnnnnnnnnnnnnnnnnnnnnnnnnnnnnnnnnnnnnnnnnnnnnnnnnnnnnnnnnnnnnnnnnnnnnnnnnnnnnnnnnnnnnnnnnnnnnnnnnnnnnnnnnnnnnnnnnnnnnnnnnnnnnnnnnnnnnnnnnnnnnnnnnnnnnnnnnnnnnnnnnnnnnnnnnnnnnncacattggtctacaggggtgttggagttgcaaccagcgacctgaagactggctaccccttgctctggattcaggggttttgtctttcccctgactgaacatgtgtaaggaccagcagctagcgtgggtgtgcctcacagtgaggagttacgcaggattagtgagatcagagggttgcatagctaagacaccacggatgccttcgctccctgacctagtgggacgtagctctgtctccagcacttcagaacccaaatcacggactggtggttctgcaagccatgattgctatgggctgccatggagggccatgctgtcagtatgtccagctgtgactccttggatatgctctttgggctcagtggaaagtgtttttcctgtaccagtaggaagtaatgttcatcaggcagactctgagtgtaaaagcgccaggctggggataatccaggccaggaggcttcaaacctgtgagttagttccatttgggggctgttaaattacagagcattgagcagtagtaccctgcttaaagaatagcaatgaaacaccatttctatgatttcctgtaggaagagaggtgtagccctgagtcttctatcagaagtcattgtctccctgtgtggcccagcgtgtcagttcccctgcctcaacctacagaggaactgttacaggcaatttcataactgtatacaattcaccctgatccatcctgtcgctgcctgaatcctctctgaaatgtttttgtagtcaggaatattggggaacccctgacctatacttcccacattgaattactaattttttaaattttggtttaatttcaaatgctgttcttctgagctgtgtcacagccctgtttgacttttcaacaaaacccactctgtaccccaggctgaccttgccctgaaatcctgtgcctcagcctccagaagacctgggattccacatgtgtgccactgggcctggcctgtcgtgtaagcaccgctacccgcacttgatgggcttgtctaagtcatagtgttgccttcttattgcacatcgactgtagcaactgttaagcaaaacagtcttgtatagaaacttcttttttacacagtaggaccagtgtctcccagcagatcactaaacgctggtagtgaccgccagccttttcttcataattgtgatgacagtgctgtcattcattgccaagtgacagggtccagctatctagtggccatctgatttcctttgaccttgtaatccttgtgtagcagtaacatcgggaaagggatagtttaaatcctaaaccccaataagttatctactttctaacaaatatgtatgacagggttggtttgagaacatcttcataatattaagagagtttcttggggtagaaaccctaagaacacagggtccagcctgctaccaggacatgattggggctacgaatttcacatataaattttctgtaatgaaagtatggctagggtgtcttgagaaatggctttgcccttaaaagcacatactaaccatgcagtagactagagtctggttcccagtctccctctcaaacagcttacaagtgcctataagtctggctccagggatccatgcactccgggcctctgcagccactgctctcagtacatagctgaggagctggagaggtggctcagtggttgggagcactggttgttcttccagaggcactgagttcaatatctagcaaccacatggtggctcacaaccatctgtaatgagatctggcgccctcttctggcatggatgtgtacacgcagctagagcactgaaacataaaataaataaggtttttggttttttttttttaagctaacatttttaaaaatagaagtggggttaaatagttgatagaacacaaacagaggcaagccagattcttgtggcaaaatactagttcaaaatttgtaataaaaataggagctaaggccaccctggtggtccgcactgtgaccctagtgctctgaagctgagctccatagtaaaatcctgtttccaaaacgtaaggccacaggtcaggcttcctctctaggatccacttagtctcttcaaattagactgaaggcagagacgaaagtcctctatctagctgactagactttcattgtctgaaaaaaactattttttattacttttggtttttttctttaaagtagcatttccctatgaacaaccatgtggctaaccttgtttcccctgaagctaaaatcttgtctggtttcttatttctgcagccttcctggcttgacagtccttctatgtccttgagagcctggatggcggggtggtgatggatcccagcggtagggaggcagaggcaggaggatctctgtgtgcccaaggccaaccttgtctacagagctcattccaggacacccaaagctacacagagaaactctgtcttgaaaaacaaacaaaagtgagcctggccacaggctctgaggagggaggggagacagtgctgcctccaccttccttccagtcattatatgtagacgtttggaatctattctttatcagctgtcaggatgcctgtgctaactttgatgcaggggcctcacctggccttagggaaatgagctgaggtcaggcactgtattgaatgaaggccagtagctggtgatctctggccttatagctttctctgactgaactggatgctgttagcttctggagatgtgacactctagcttattctgtggctgaaaaccactggccttggagattaacacatgctgtatagcagacagctcgccaagagccctattgcagaccaggctagttaactccttgtgaaccagagaggaaagagagtcacacaggaaacccacccattggatgaagcagaaatggctacatcactacaattggatgggtgcatggatgtgtagatggattgatggctcagagccccccaagccaaaccatcatctgtatttcttttctctagccttcttataggtaaaagttcttagaaaattaccttatggataaaatgttacacaaaatgggagttccgaaaggatgttgacattaagttcagagcagtgtttcattctatatgcttgttataagttcagagcaacatttccacatggccttgtcctaccatagtgcacacctgtggcttcatctttggacctcatactcttctcttaacacaaacttcatgcttttccttgaacacaaagttatcacagggactgaagagatggctcagcagttaagagcactgactgctcttccagaggtcctgagttcaaatcccagcaaccacacagcggctcacaaccatctgtaatgagatcagtgccctctttccgtgtaactgaaaacagctacagtgtacttctaataaataatagatctttaaaaaaaaacaaaacaaaacaaggggctggtgagatggctcagtgggtaagagcacctgactgctcttccgaaggtccagagttcaaatcccagcaaccacatggtggctcacaaccatctgtaaggagatctgacccctcttctggagtgtctgaagacggctacagtgtacttacatataataaaaaaataaataaataaaaaacacgaaaaaacaaagttatcccaaggctagtctccttttattagaatatgagtgctcattttatttcttaatatacaacccttacttaatgttatgagcagtgggcaattctgtgcttgattatacctttgttacgtctttttagcaaaacaactaaaaccaagattatttgaatcaaattgagaattctataaaattattaattcatctaaactgaattaattcatgaaagttcctctttatgttaatctgcaggaagtctactcaatagggtgggctaatgcccagggattattatattattttagtaatgacaggaaaggcatattagctacaagaagcaatcctgagaagtctctttgggaccttgcctcatagagcttacccattgcagacaatgcaaaaacagtggatcacctcagggaaggccactattagattagccttagcctatcctagattgctccggacactttgagttcccttctttgtttccttgaagaggtaaagtaaatgttgaggcaggtttgggcaaatggtttctgctcatgctgttcttttagagtcctggaagcctgcagatacagaaggcaagaagcagtatgaccgggagttcctactggacatccagtttatgcccgcctgtatccaaaaaccagaaggcctgcctcccatcagcgacgtggtccttgacaaggtaagccgtgtgatctgagtgttgagtacagacaggtgcagtgcaggcagctcttaggaactgtcagatcacaggcattaaaaaatgtaatgcttaagaactggctgggcccagaatgttgtcttttttagatatttagaagttctttctttttagatcttattttattnnnnnnnnnnnnnnnnnnnnnnnnnnnnnnnnnnnnnnnnnnnnnnnnnnnnnnnnnnnnnnnnnnnnnnnnnnnnnnnnnnnnnnnnnnnnnnnnnnnnnnnnnnnnnnnnnnnnnnnnnnnnnnnnnnnnnnnnnnnnnnnnnnnnnnnnnnnnnnnnnnnnnnnnnnnnnnnnnnnnnnnnnnnnnnnnnnnnnnnnnnnnnnnnnnnnnnnnnnnnnnnnnnnnnnnnnnnnnnnnnnnnnnnnnnnnnnnnnnnnnnnnnnnnnnnnnnnnnnnnnnnnnnnnnnnnnnnnnnnnnnnnnnnnnnnnnnnnnnnnnnnnnnnnnnnnnnnnnnnnnnnnnnnnnnnnnnnnnnnnnnnnnnnnnnnnnnnnnnnnnnnnnnnnnnnnnnnnnnnnnnnnnnnnnnnnnnnnnnnnnnnnnnnnnnnnnnnnnnnnnnnnnnnnnnnnnnnnnnnnnnnnnnnnnnnnnnnnnnnnnnnnnnnnnnnnnnnnnnnnnnnnnnnnnnnnnnnnnnnnnnnnnnnnnnnnnnnnnnnnnnnnnnnnnnnnnnnnnnnnnnnnnnnnnnnnnnnnnnnnnnnnnnnnnnnnnnnnnnnnnnnnnnnnnnnnnnnnnnnnnnnnnnnnnnnnnnnnnnnnnnnnnnnnnnnnnnnnnnnnnnnnnnnnnnnnnnnnnnnnnnnnnnnnnnnnnnnnnnnnnnnnnnnnnnnnnnnnnnnnnnnnnnnnnnnnnnnnnnnnnnnnnnnnnnnnnnnnnnnnnnnnnnnnnnnnnnnnnnnnnnnnnnnnnnnnnnnnnnaaaagtccccagtcctttgcatagacttaaagccttctcttttgaggttttttttgttttgttttgttttgttttttgtttttttgagacagggtttctctgtgttccctggctgtcctggaactcactctgtagaccaggctggccttgaactcagaaatccacctgcctctgcctcccgagtgctgggattaaaggcatacgccaccacgtccagcgggtctcttttgagtttttaatgcgtatttattactttatgtgtatggatctttgccagcatgtatatctgtgtatcacatatgagcctagtgttcatagaggcaggaaggggctgtcagatcccctaggactggagtcacatatatgttgagttgccatgtaggtaatggaacctcaagtcctcttcaagagcagcaagtgctcttgaccaccgaaccatccctctgtccccatcatccttcctctttatagtttgtttatgtggtgcacaataaaagttagtgcagtacgggcttgtttattatgtagtgagtgcataggggaatgggactgggtggtggttaaagtacttactgcacaggcctaatcattcctggcggccactcacatccagcagctccggggctagtttcccgagtgagaatcagcgcttacctggtcagctcaccgcatcagtggcaatgaatgcactggcacacgtgtgcgtcaagctcttctctgcttcttcatgcagatcaaccagcccagattgtcaatgcggaccctggatcctcgcattttgcctcgaggacctgacttcaccccagcctttgcagattttccaaggcaaacgcctggtggaagaggtgtgcctgtaagtaccagttccctaccacagcccagtcagtcaggaagctgcggttaagatactgtgtctaagcacgaggagcggcttctctatgctgagtcctgtgatgaaaaagtagaagaggcaaacactgtcctccgtgctcatacccatgggagtgttacagcaaagggatgagcactgtctgaccacagcggcttggtctgctctgtgttaaccgtctccgttgaagttgaccggcacattcttttgctatagaaccagtcttgggtagtgttctgggatgtcatggtatcctagagattccagtggctttcagctaatcctctctttgtttctacagatttacaaagtgcaaagtgggcatggattgccaattctggaactaagcccagccccggactgccctccataagcggtgtctcactcacccctgacttgcttacctgtagggaagggctgcatctttttttatgtctgtgttgatgtcgtctttggtttgctcttatttactataggccatgaagtcaaaatacaggcaaatggcgtctccggaagtgtagtgttagtaacttacttgtgggttgtcagacacacagagtggcatcgccactcaccagagggtctgcactgggtacctgacacactgtgccagactgcaggttcggtccactccctcctctgtagatcagagggagcgtggggaccattggttcttctctacatggcatggctgtgctctctgaattgcctgatggagctcctaaatcatccatggaaagtacagagcgggggctctccggacggtgggctctccgggcagtgcgtcttctcaggttttgctaccagctcattgttcgttgttatccaatacttgatgcaaagcaaggcatatgagttgagaacaagttgtatctcttagaaaagagtggaaatagacatgaaattttagagcgacgttttgggaaagtagagaggtgccttagttagcaaagtgctccccacaaagccgaaactagtactataaagtactatatttttttaaaggatagtttgggggtttttttggttttttgttttggtttggtttggtttggtttttcgagacagggtttttctgtgtagctctggctgtcctggaactcactttgtagactaggctggccttgaactcagaaatctgcctgcctctgcttcctgagtgctgggattaaaggcgtgcaccacccacacccctaaaggatagttttaaagttaccatttataatatcagtgcaaactaaagctctcacctcaatgtaagagtttattctagaactagagagatggctcagaggaaagagcactggctgctcttctagaagtcttgagttcaattgccagcaaccacatggtggctcacacccatctgtaatgggatctgataccctcttctggcatatatgtttgataaatatatcaattttgtaaagtttactttagatttaacagtgagtgagcaaggcccaagtactcagatttgggtttcttcaaatgccccactctaacttcctcgcagttctatgacattttttagtaaaagaacaaaagaataatcactttttaagtacaccaatggagattttaggtaaggggttataggcagacaggggaatcttgccttctggcctcacagacaatctgatagtattcttgtcccttggattagtagaagatagggatcgttagcacgccccaaaagaattccctaatgatgacaaagaagttatgtcaagcacagaggtggccaatgaatggcttggtaatggtgctaaagatagcccaggataggttggctttctcgtgagaccctcagcttccccgcttcacagaagctcaggcagtttgccttgtataacctttttaacacggggtggctttttcctctgggaaattaaagtgggtgaggagatgtgtgccagtcggtctcgcttgcaggttatactctcgaggcgtacttactggtgtttgcactagtttttgtaaatgactatcctcaaatatgcattgtgtgaatcttcttcatatgaggtatatagatgtatggtacacatatgcacaaggtacatgcctgtggccagaccaaggaccatgtctagtgtccccctccatcacagatgaccttgttttttgagacagggtctcctgtggaacgtgggtggggcttgctgtttcagctacccaggctggcaacaggctttcaggatggtgtgtctgcccccaccgccaccactgaggttgcagatgtgcactgtcactctgtgtcacctgtcttttacatgcgtgctggggatgcggcgcctgcatgttaacacctgttctgtcttgcagggccttcattctgtgaccttccatcattttatatcagttcctgtttccccagggcgtttgttctggtgtgtttttatatccaagtgggggttaaattgtttacttgttatttccaactctggaaagggtccttatccatacaagctgcctgaggaatgtgagtctgatcccaacatccaggcagcgtttggctaactggatagctcagcagagctctttgggctagagcctgtataggagatcatgtgtgagtaactgtcctcactctgccgcagccactgtccctgctgtttctatctttagtgccactcggttaaaccatgtctcattccttatctggcctgcttttgtttttgttttgttttaatgtttgctgaaacatatgagatcctgccatctgttctgtgtcctttcttggtacatttgacagtattcacgaggatttgaactttcatcctgatgtccacttggcactgccatttcgagtccttgactcatggttggtgtaaggaatgcctttggaacattgagttggaaatgcttttaagcttatcaaccttggttaggtctgtatctgacccggacagtctgtttttatggtactttagtccgtatttttcccccggagttctctatgtatttaaaagtgcagcactgttactaaatgagatactattgtggtttgcatcttacgaagactttttttctgtagtgtcaacaatcctcttaaaaataatgcaaatatttacagcatttgaatcagaagaaaatccaggttatcattgtgtaacaaggctgagaaatccaagcacagtatcgactctgactaatcttgagcagcaatgctggctgtggaggctctctagttcaggagagcctaaactgcaggaaagcctgcctgtgtccccaaataagggcacatgccttgaattccagcggagacagccagggctacatagtgagattatttcaaagagggacaaaaggaagtaaagttcaaaatccaataaaggaagctgacttaaaacacatttaaggtggcaggtgttagttctacatacaaaatatagctttaaatttttgtttatataagactttttaaaaacatgcgtatgtatggatttgtacatgttgtatgtgtgcattaactgcagagaccagaagagaacattggaccccaaggacctggaggtcctggcatttgtgagctgcctgccatgggtgctcggagctccagccctaagcaaaaacagtgggtcctatttaaagatctattcattttttgtgtgttggtgagaactcgatctgtatatatacctgcatgctacaacagggcatcagatcccaggatagatggaagtgagccaccgtgtggtccttgggaattgaactcaagccttttggaagaggaagcagtacacttagctgctgtgctctctctctctctctccctctctccctctctcactctctccctctttctccctctctcggttgcaaacagtagttgagctacctaacgagggtgcccggaaccaaacttggtgtttcggggaaaaaaaaacaaccccacccccttttttaaggtagagctccatggagcttagtttcctggaacttgccatgtagaccaggctggccttgaactcagggatccacctgctttcccatcctcgtgctgagattacaggtgtataccatcatgtctggccaccagcaaacattcctaacttctgagccatgtcaccagccctgcacaatttattttgctttaacaatatttaacttgatgaccattttgtcattgatgcatgtttgtattactacacgtatcatggtaggaggggaagagagaaatacagacttttttccagacaagagttagttccccttgcattgaagaagtctggaatcacaatgccttaagagtgggtgtctgttacagaaaatttaataataaagttgtattgaaattctacctggaaagttcacaaatacagcttttgtttcaatgtcttattgggttagaatttattaatagtttgttgttttttgttttttgtttttttggttttttttttgacacagggtctcacccttagcccaggctgtcctagaagtcagtgtagcccaggctgacatttctatctcctgtcccacgtgctgggctgacagctgtgtggggcagtagcacccctagtacagatagttgtttctttcctttcctttgacagattgtgggtgtagctggggatgtctcctgggaacgtctgtggagccctggtgtgcccatcgaggcctgtgccaccggtgtggcttctgttgagcacaggcttcctgggttgcagtggtagtttatcagacaccattgtttgatccttgaaccttttagaggtaaagccgttgcaatgatggtattctgaggcactctctccctcctgcctcctcaggaagattatttctaacctggacacctaatacctggtcttttcatctggaagtgtttgctgtgaccatgaagcttgagcagccacacagaagcaggctgctgggcgttctctgaatgcatgtaatgttcttgtcctagctgttgaatgttggacctcggaggtctcaacctggccagagaagggagcccagaaagataatcactgtctccgtaaaagaagatgtgcacttgagaaaggcagagaatgcctggaagccgagccagaaacgggacagccacgccgatgaccccgaaagcattaaaactcaggtgaggagcactatgcctgtgtcctgggcagaagtgtgttactagcctgagccttcccgtgcaggctctctctatatatataatagcattgttctgtgggcctcattactgaggcctacataataagaaataatcaattctgtgttggtggcccaaaagtgtcattccagtaacagctgtgtagaccacctcaaactcagccttgtaccctagtgttaaaagtgccagtttcattattccccttctgcagagccgtgtttccattgtgttggtgattagtctgtgacctgaggatcaagctttctttctgcttctgtctctgtggacggaaagcacaacttgtgctgccagaggcttggtgggggtgggggtggggcatcagatcctctggaactgagccaattgtgagctgctgtgtgggtgctggaaatgaaccctttggggtgttcagttttggtgttgtctttatatctgtcgtatgggattaagtccttgaggttggttggttggttgttaaactaactgataacatggaaagcttacgcagattaggatttgaattaaactgtagatgacaaaagtgacattccagtgacagagcctcccagcaggtgaggcttatccgcctccttctgctctgctctggtcttctctcagtcttcctgcagggttcagtccttcttagaagctcctgtggctgttttgttgggtgttttactaagtactaggcaattggaagcaagacactgtctcaaaaccagggagggatggagggacagaggcaggctgggtgaagggtaggtgggtataaactgactgacagcctttgcagcttgttgtggctcctgaggtcactgggctggctgactgggagctctttatagacttgcagtcaggttttatgtgcagacagctgttgtcctttgtggactgggctggtctctccctttccgaggtgttggtctttgtttttcttcttacacggaggccctttcagagggtattgaaaagcagtggtaaaaataacatagacacgtgggatattgctgcgctgtttctttttcttttttagaattatttattttatgtatatgagtacactagctgtcttcagaggcaccagaaggggacatcagatcccattgcagatggttgcagccaccatgtggttgctgggaattgaacagtcaatgttctccagccttgtccactgttttacattcttcttattaactctaagtcaactctttgggacagggcttcacctagaactcctggctggcctcgcactcaaagagattgcctgcttctgcctcctgagtgctgggattaaagtcctacaccactgccccctccttgctctgtacagctctaagctgcttattcaaaaccagcaaaggactagttttaattttagtgactccccactagtcacatggtaggtctctggtgacaggagtttccagtacctaggctctggcctgatgattcaaggtcagcctaggaaatatatgatgctttcttttttgtttggttttgttttttgttttttcgagacagggtttctctgtgtagccttggatatcctagaactcactctgtagaccaggatggccttgaactcagaaatctgcctgcctctgcctcccaaatgctgggattaaaggcgtgcgccaccactgtccggccatgtgatgctctcgtaaatttttgtgaatcaaaatctttttatttagccctaattaggaacaaattttttaaaatgatagtcattcaaaggttgcatcaaccattttaaagctttaaatgcactgttcaggtctgagaaatgctcagggaagaggcagggctgttttacagttgaacctgtataggatatggaatccccaacctaccccccaccccccaagttctggttccataggagcaaagtggaagaagaaaggaaactgtattcaattttcctgactgaccattaagtgacaagtcgttcctcctctctaaaatgttccatatgaagagcagtgtgggagttcccttagatgttaagtgggtgcatttaagactggctaatgctgtttattttaaccctcctaggaacttttcagaaaagttcgaagtatcttgaataaactgacaccacagatgttcaaccagctgatgaagcaagtgtcggctcttacggtggacacggaggagcggctaaaaggggtcatcgaccttgtctttgagaaggctatcgatgagcccagcttctctgtggcgtacgcaaacatgtgtcggtgcctagtaacggtaagaagagaggaagcagtaaaccgagagtcgccaagaggtatactctcccctcagtgtagtcttcccagtgttgttgcagtgcaaaggggagaatagattgctagccctggtgtatctgttctcactgatagaaaagaattttgcaaaaataatgtctgttcccacctctggggcggggtatttggagacttgcttgaaatgggcacaagcttatggtctcctccaacccggagaaccctgtgagggttagggagtagtgtggagtcagatcacaggcaacggttttattctggagtgtcttcttatagaactagagccggtactaactttaacataaactaaatttaaaattaaattaactcttctaattctggcctctgaaactacgaagatagttgtcttatcatcaaaaatattcaaaatcggaatgtttcctctcttgctagacatagtagctcacaccttcagtcctcgcactcaggagcattctctcagcattgagacctgcctaggatctcagcaacaactaaaataaagaaataagcattaatttaatccatagcatatatatggacatacatacacatgactaagattaaatcttatttaaaccaagagaagcaagtgaattcaatgttacagcattgtaaacatagcattcccgcttggataattgtctacctgctgaagaaattcgtagaaagggaaacaggaagagggagggtgaggcgggctggcgctggctcagcacctccaccaccagccaccgcctgagccgcctaccgctccttgcatctacatcattgtgtgggtgggtgtggcaaacatagtcatacaagtttccatatgcgagtgtgtgtacctgggagaccagcaagggcgtcagattccctgttgttacaagcaattgcgaatggcctgatttgggtactgggaccttaacactggtcctctggcatagcagcaggtgcccctggagccctcaaacattattctttgttgattgataggacctcagctctaacactgagctggatcagtcttcttccggtccttctccctcctctccagctgccagcatctggagatggtttgagttagcgttggcctctctgggagctgccacacaccgctcaaggagagaacagtctctgacaacagaggtttttagctcagctgacagtgttcaagcaaccctagctgggtagtgtcgtcacggattaagggggatatgtattctcattatttagaattcctttttcagtctcagtgctgtgtacatagattgtgtgctttccactcatacccacactctctctttcattgttgtgttttttggggcgagataagaaacacggggctttgcacatgctaagcaagctatgttatcagtgatctaccaacgcttcaacatatctccatttgaacccttccttctaggtgacttgagcccacccagcactataaaaatgagtgagagactgaaatgaatgaatgaatgaatgaatgaatgaatgaatgaatgaatgaattgaataccttctcatgtgatttttgcattgcttaggtgaattctaaagaatacaatggagtccctttttttctcgcattgttagatatgttgaggagctgatattacagatgttttaacaagccacacagctgcacttgatgcctttccctaccaccttgtgctcaggcaaaccatgtacaactcagggatcagaagagagaaaggcagcttccgatgcatagcttctcccaggtcaataagaagtgactaaaggacactcgggacctcagccagctggaaggcacatagctgaaatgtcacaccttagtgcctgaagagaactgtcctacaggccttattgatagtgacagtgtcaggctggagtatcgtcagttgtatcattgaagagtcgatgccaacaagaccctatctcagcattgaggaacagtagattagccaggcaccgcagctcactcctcaactcccagcactcaggaggaacataaaaagttcagggccagcctgggctgtgtactgagctctaggctagccagagatctatactgtagacctcactctcaaatcataaaatataaagacatttttaactaaaataaataaattaattttgtaacctaagttgccatattttgttctaattaattagcatgaaaatgaaaatctacattccagaatgcctctgaattgctgctcaagtcctcctgtctaaaataccactttgtgtctggagagtgaatgcctggatacaaaagtgtgctgtccaggtttatgccagcttcacacaagctggagtggtcagacaggagggagccccagttgagaaaaatgccttcataagattaggctgtaggcaagactgtaaggcgtgttcttacttagtgattgatggaggagggcccagcccactgtaggtggggccatccctgggctggtgttcctgggttctgtaagaaagcagcctgagcaagcagtggggaacaagccagtgagcagcgcccctccaaggccttcaggtctcggcttgaatttctgccctcactgcttttaactgagaatgaaataaagcctttcctccccaaaatgcttttggtcatagtttttatcacagaaatattagccctaattaagaaggtaaagaatttgagaaagtggtgtgaagcaggcctgtaattccaatgggaacatgagaaggaaggccaaggtcctcagctatagcctggagtacttgggatcctacctcaaaaagtcaagaagataaaacaaaaacttgaaaaatctctttccatgtcccatgagaagttcccttgtgtcttatctgtgtggcaggagtgtgagtctggagcaaaatggagaaagctgccaaggaggttgaagcatctgggagttacgttcctctgcacaggtgtgggggaagtgaggagagagggatgggttgcgagtgggtcagactccgccgtgatgactggaaagaaagcaaggtgcacgtctgtgatcccagcactggggaagctgacaagatgctcaggagttggggcagactggtctaacagatcagatatctgcctcggaccatgggtgtggctggcgtgcattgggtgaggaagcgagtgtctcttgcacagtgcaccgaagcagcatccagctttgggaaaagagggctctgtttggagttttgtaggcatccttctgggtgtgtctctgggtgtctccagtaaagatgtctttccttgcttctgtgcacagtgtaggtagcttgttatatacactggccttggagagaagatagtagtgggttgaaggagctacatttgaactgtcaccttgcagtgacatcccaaatgctgcgactgaggcctgtgccagttaacatgtgccagcctggtaactgactctgggccctggtgtgacagtagggtggacctgacttcactgtgatgtcatggctgttctttgccactttctccagcccttcagttttgatcaggtgtccacagccatttcgttgataagattaatcctcttgattagtcttgatagcatatctgatcccagcacttggaggacagaattggagcggggtggggggggatcaggagttcaccatcatcatagctttatatgaggtcaaggccagctgcagctgccgaggcgcctctcaaaaatagacagcatgatgttacatgtttgattagggtttcatccctgattacttcaaagcaagtaagaagggtgtgatgactggtgactcaggctggtatcccagcactgaggtgccataggcagtacagttccaaatttgaggccaacttgacttccatgatgggacccaagcctgcctaaagtagtgacaccctgtctcaaaaacagctaccccccccaaaaaaaatgattttcacccacatggctgaggcagtatattaatttaagaactgttggatccactttctgagtccagaaaagcccttttccgtgttgtacagtaactgagtcggagaatttcgtgttttcttataatggaggctacattctgctgtcagcataaaaggagggtgagatggctcagtggatacaggtggcttgctccacaacctgatggcttgagtttgatccccattccccaagtagaaagtaagaatcctccacgggtgcaccaagtgcatgcatgtgtacatgcacactcacacacacacacacacacactcacacacacacacactcacacacacacacacactcactcacacacacacactcacacacacactcacacacacactcacacacactcacacacacacacacacactcacacacacacacacactcacacacacacacacactcacacacacacacactcacacacacacacacacactcactcacacacacacactcacacacacactcacacacacacacacacacacacacactcacacacacacacacactcacacacacacacacactcacacacacacacactcacacacacacacacacacacactcaccttatataaatgaaataataataaggtttaaacaaagagattaccttccacagtttaacggtgtaggtatatggaagtaaccactgtattcataatagattccacttcagcttgggatatatccacagaagtcagaaggtgtgtgtcttctctgtgtcagagacaagacagctttctgttgcactgtgtgaaagactcagctatgtgttttagaatgtctacctgtgtgtctgtctgcattaagtaacctggctgccgttgctctttgttctctgaatgcagctgaaggtgcccatggcagacaagcctggcaacacagtgaatttccggaagctgctgcttaaccgctgccagaaggagttcgagaaagacaaagcagatgatgacgtctttgagaagaagcagaaagaactggaagctgccagcgctgtaagaccttcttgacataaagtactgtcagagttgtcctacaactagctatggcacctacagagggaccgtgtgtgtgtgtgtgtgtgtgtgtgtgtgtgtgtgtgtgtgtctgtgtgtctgtgtgtctgtgtgtctgtgtgtctgtgtgtctgtgtgtctgtgtgtcggcgtgcgtgtagaggtgtagtgttctcattgaaaatgctttagtcctatgttagaggcagtcacttccacagcaaacgttagtctaacatagaccttaggttcatctatctggaaggatgcacactttggtgtgtaggtcttttttttctgaggagtgaggctcagtggtccttgtcagagcatttgagccccgaaggagtgaggccctgcaatcttaggtgttctctccccccccccccccccccgttttacacaacagccagaggagaggacaaggcttcacgacgaactggaagaagccaaggacaaagcccggcggagatccatcggcaacatcaagttcattggagaactctttaaactgaaaatgctgacggaggccatcatgcatgactgtgtggtgaagctcctgaagaaccacgatgaagagtccctggagtgcctgtgtcgcctgctcaccaccatcggcaaagacctggactttgagaaagcaaaggtaccacgcaaagactcaagtctcccggccccagggagcctacccctgttggagcagtctgtgtgcaggctccttccaccctcctcatggcacatgtgactgacagtgctcctcacagtgctctaaggggaggtgctccctagtcacgtgcaggtcagtccgtctgcagcctaggtgggttggtccttctctttcataaccattttataggttataagcagaagtaggttaagaaatggaccaggtctgaaaaagaggatagaaaagctagtggggttgttcattatgtgtgcaccactgtgcccacttcaagtcactgtttctgttttgctttgttttttgagacagattctcactatgaagctctggcagtcctggaactcactatgtagacttgagtagctttgaactcacaaagatctgcccacctctgctcctgagagctggggttaaatgcatgggacatcatgcccccttctcacttgcttcttaagtttaaggactaattaatgacattgccacctaatcattgtataggaagctataaagacatagtctgacactgtacaaataaaggaaacacattagaaatgcttcagagaaataatgacagagatgagtcacccagggttatgtttgtatgtgacagaggcagggccttccagctttcaggcctaagcgtgtatttcacatcttataacttactctgcttgcatagtttcagcagagatcataggaagtggagcgtggagcaaaggacagacagagtgctgggtcttccaaagctgcagtatgacatgccaggagcctagcaagtgtgctctctgtagtggctgcatatattctccattaaatgccattgctggcgacagggaaattgttgaatgattacaggtgcttgcttgccaagcctgtcagcctgagtttgatccttgggaaccgcatggtggaaggagggaacgactcccagaaatctcctcccacctccatgtgtggacacatagtagaaacacaatacagtggtaataaaatttcaccagtgcttctagccataaaaagttattctttaatcacctaaaactctacttggtaccttagagtggtccattacccatctgtaattattccagcactcgggaggctgagtcagagcgataacaagttcgaggcagcctagactgcagatgaggacctttataataaagacaaaaaccaaagtacatggaaaaaaaaggaaattgaatttctcggccagaaatcatggtggttttattatttgcagccacgcatggaccagtactttaaccagatggagaaaatcgtcaaagaaagaaaaacttcctccaggattcggttcatgcttcaggatgtaatcgacctcagactggtaagtcaggtttctagcaatacacaccatgaccagaaaccatttgggaaggggagggtttctttcagtttagttttatagtacagtcttatggtcaaaggcagtcagggcaggagcctggaggcaggaactgaagaggaagccatggaggaactgctgactggctttctcagcctgtgttttacacagctcaggaccacctgctcagagacaaaccacatgcattaatcagggaaatgccctccagactgcctgtagtcagtctgggtggaggcatggtctttttttttttttttttttttttttttggtttttcgagacagcctcctgaaactcactctgtagaccaagctggctggcctcgaactcagaaattcgcctgcctctgcctccgggtgctgggattaaagacgtgcaccaccacttccagctttttttttttaaattagatatttactttatttacatttcaaatgttatcccctttcctggtttcctttccgaaaaccccctagctccattcccctttccctccccctgctcaccaacccacccacacctgctttcaggtcctggcattcccctacactggggcattgagccttcacaagaccaagggccttttctcccattgatgactgactaggccatcctctgctacatatgcagctagagccatgaatcccaccatctgtactctttggttggtggtttagtcctgggagctctggaagtactggttagttcatattgttgctcctcctatggggctgcaaacaccttcagctccttgggtcctttctctagctccttcattgcgaaccctgtgctcagtccaatggttggctgagagaatccacctctttatttgtcaggcactggtggggcctctccggaggcagctatatcagactcctgtcaggaagctcttattggcatccacaaaagtgtctacattcggtgattctatattggattcagaaccccaggtggggcagtctctggctggtcattccttcagtctctgctccacactttgtctctgtaacgcctctcataggtatttttttttccaccttctaagaaggatcagattatctacactttgatcttccttcttgagtttcatgtggttagtgaattgtatcttgggtattctgagcttctgggctaatacccactatcagtgagctcataccaagtgtgttcttttgtgattgggttacctcactcaggatgataatttctagttccatccatttgcctaagaatttcataaattcattgtttttaatagctgagtcgtactcagttgtgtaagttgtgtatcacattttctgtatccattcctctgttgaggggcatctcaactaaagaatacctaatggctgagaggcacctaaagaaatgttcagcatccttagtggtcagggaaatgcaaatcaaaacaaccctgagattccacctcacgccagtcagaatggctaagatcaaaaagtcaggtgacagcagatgctggcgaggttgtggagaaagaacactcctcggttgctggtgggattacaagctgttacaaccactctgagaataagtgtggcagttcctcagaaaattggacatagcactacctgaggacccactaataccattcctgggcatatacccagatgatgctccaacacgtaataaggacacatgctccactatgttcatcacagctttatttacggccaggagccgtaaagcacccagatgttccttaacagaggcatggtctcaattaagaatcgtcttctagataactctagcttgtgtcaaggtgacagaaaggggtgcggggggagatcaaacagactcaagtgaagaagtcggtgttgtttgtgtgagtggcacggttcttgcttcatgcccaggactaaagtacaagaagaaggcactgcctggcttttttttcccagttagcacaccacactgcagctctgacattggtcatctgaattcagtactggtcagtgagactcaggctttctaaactgaacagctggagtctcctctccatagtgaacatgttgaactcataagccatgtgtttgatttctacaatgatgctattgctgtccttcagactgtacnnnnnnnnnnnnnnnnnnnnnnnnnnnnnnnnnnnnnnnnnnnnnnnnnnnnnnnnnnnnnnnnnnnnnnnnnnnnnnnnnnnnnnnnnnnnnnnnnnnnnnnnnnnnnnnnnnnnnnnnnnnnnnnnnnnnnnnnnnnnnnnnnnnnnnnnnnnnnnnnnnnnnnnnnnnccgtaccacagttcagtgagataagtgtctccattgaaactcatgggcaccctgtcatcccggctgccatgtttatctgcctcagctggaagcactgccccttcattcctctcagttcttagggcaccaatgaggcttctttgtcttgctaaacccaggtataatcttagtagcaaaagctgtgacctgttgctcagagctccctcacaagctaaattcaaccattttccacccatgtctccaccatatttgctcatttcggccattggaatggaggctgggatggagtgaggcaagttttgtctcctgagaagagagaagcagctttgtgtggcattctgggtagggtaccagagtcatagtaaaggaagaaaaatgattgtcccctttgatttagagctgctgtgaaccaagacatgaactgagtattagcccctcatgtcacacagtcctgaagaatctcccttcttcctggcccacttcctttctctcctagttcgtcagccatcctggcagctgcatcagccacttcttccttctgacgcttacccttcagttgttggaatgtgcgctgcacaccccgccagagttcatttccttagcttgaaatcctacagtacccctgtcatccgtgacaagctgaggggcttacttctccacttagcaagatattttatatggtttatgcagtggaaaagtagacgctttttcctttttggggcttggggtattaccaggtttctctgtgtaaccctggctgtcttacaacttagtctatagaccagactggcctcaaaatcacagagatctgccttcctctgcctcctgtgtactgggactaaaggtgtgtaccgcactgcccagccaaagtataagcttttaattgatttttatttggaaaattacattattgttcttaggtgtagtgctgaggaccaaacgcagaacgttgcacatggtaggcattcaccaggttagacgcctgaccctttccgggtcgtcctgtgggacttgactcttagccttgttctcttctcatagtgtaattgggtgtcccgaagagcagatcaggggccaaaaactatcgagcagattcacaaagaggccaaaatagaagaacaagaggagcagaggaaagtccagcagctgatgaccaaggagaagaggagaccaggtgagacagaggctggggtgcaggggtgcagggggcagggtgctgggactgctaggcaagtgctgcgctccatcctacagtgtgtcacttttatttcttttagctttttttcttgtgacaaaaccttgtgtctatggctagcctggaactcacggtatagtctaggccagcctggaatttctcctcctgcttctgcctcccaaactctgggttgatgggtatgtgccaccatgcctggctttgcacatatttttaaaataggtgggaggtagaggcaggcggatttctgagttcaaggccagcctggtctacagagtgagttccagggcagccagggctatacagagaaaccctgccttgaaaaaaacaaacaaaaatggcagggcaagatctgacaattagatatgaaatttaagataaggagaagtcaggatttctcctgagcacccaaggcttggacagagagaaacgcatgtgcattccacagcactattgatttagatagtgaggtccatccaactcctccaaggtgtagatgcagcctctgttgacccttagccctgcagatcccagactcagtgccagttcagccaatacccattaatcactgtgtttttttgtttttgttttttggttttttttgtttgtttgttttttcctaagtaatgtttcctgatagccagagagcttgggcttggcattcgtatgctgtgacttaaagactccctgccagctgtagtggcacccacccgacgtagccagccacatctgctctccacaggcagactctgtctcaagaaaaccaagaacactccttttactaggactgccattagtattttaactttctgtttgtgatctccttggtttgatggcattcctcggttgacagtattctcagcgacaagctggcttgaggcagtgatacaccgcctcactctctcctccccgcaggcgtccaaagagtggatgaaggtggatggaatactgtacaaggggccaagaacagtcgtgtactggacccctccaaatttttgaaaattactaaagtgagtattatactttaccaagcttggtgtcttcctgttatcccagtacttaggaggtgggggcaagagagtcagaaatttatggttatcctcggctccgttgcatgtttaaagccagcctaggctatatgagaccctgccctcccccaacgtgtctgtgtgtgttgaaaatttaaaacacacactcgcagagccaaatatggcagcacacacctttaactagcacttagttaattagttaggaagttgtggtaggaagatgtttgtgaccagccatggctatataaactgacgaagcaatttgcacataattgggcattgtggtataagaagaatcatttgggtctggagagatggctcagtggttaagagcactgactgcccttccagaggacctgagttcaattcccagcaaccacgtggtgcctcacaaccacttgtaacaggatccaatgccctcctcttgtttgtctgaagacagagaaagtgtactcacatacataaataaatattaaaagaaaaaaatgatttgaagctgtgtaatttgttgagcatgttagtaagacattctgtacagaagacccgagcataccctgaaaaccagagtggccgtcatcacactgttctgtgggtcccaccttaatgagcacagctccagtttacagttgcttgttttattttgaggcaaggtaccctggctggcctggaatttgctatataaaccaggctggcctggaacttggcctccaaggcttgtgttaccttacccagctaaattcattgtctttaaactgaaactttgttgctaaagttgattatatgtcactgaagaaagccatttaaaaaatgtacccttgaatgacctttggccacttttttatagcccaccattgatgagaagattcagctggttcctaaggcacagctgggcagctggggcaaaggcagcagcgggggagcaaaggcaagtgagtccggtaagtgcagagggccctgggctggctggctggtctgcatgcttttgccctgcagtgccttccctgggtctggaattgtgctcctctgcctgcagttgctgagccatactcagtggttctcagtcacatgacacagccacttccttttctatagggctctttcaacatttaccattagatttattttatcagtaggtgtgttttgcttggatcttcgtatgtacagcacatgtgtgtttcttgcctgcaaggtcagaaggtctcaattttgggatctagagttagaggtgattatgagctaccgtgttggtgctgggaatgatggaggttctaactactgagccttctctgtgtaaccctgcctggctgtcctggactatctggatctatctgcttccttttttttttttttagtttgagacgggaggttctctgtgttcccctggctgtcttggaactcactctgtagaccaagctggccttgaactcacacaaagtaatccacctgcctctgcctctgaagtgctgagattagagacctgtccctccacaccaggcctcaggtgttgtttcaaatgcctataatcctggcatttgggtgataaggatgggaatccatgctcatgcctacctgagctacatagcaagacacagttgtcaaaaacctagtttgtagctaggtgtggtggcacacatctgtaatgctaacactcaggaggctgaagcaggaaaattacctaggcaacatagtaagtcccagggtagcgagaggtttgagccagcaagaccctgtttcaaaaacagaaacaaaaaggttgggtgtgtggctttatagtagagtgcttccctggtgtgcccgaggcttgagttttggactaagaatgagtgtagttgctgatgttcgtcatgtagatgtctacatcggatatagatgacacaatactatcatctacgaagctcatattgctgacctctgaagagctgctgacctctgatggccctcaagggaggggattggttctctttaaagagtgtggctcctggtgggtctgttgtgagccagctgaaggctccatactcccaagtatgggagcagcacacattggacttggtggagtttggggatttttgttggtggtgtttgtttgtttgttttaatgacaagtttagaggggttggaagtggatcggggaaaagaagttttgaggcgtaagttgggggtagttatgattaaaatacatactatgaagttcttttaaaaattaataaaaatacttcttaaatttcacactcaagaacacacaatctaattgtaaaataatatgcaaaaaactctcacaatgttttattaaggttattatttgccttggtccaaatttgtgccaaattagaccaaatgtggccaaggtagaagaagcctgaaccatcacaaacatgtattgaaaactaaagcaacaaaatgatccaaaggaaagtgaagaaattgcaacagtgtttccttaggtcacttaacagtcaagtgtttactgctgcctttgctactctcacataagtcattgcgcagtgccttggcgcagttccctcccccctgcttaccacacctgtctttggtgtgtgtgcttggttggtcggtgtgtgactagattccgtgtagcccaggctgaccggaagtcactgtatacctgagtatgaccttgaactccttgcatctgtgactatagagtcctgagatgatggagttgccaccatacctggctgaatgtttttaaggacataaatttgtagcaaacagaagtttgtaggcctttttatatgctgataccctataaatgtacttgtcagaatatggtaggtgtcacgtgtccttgctagaaattactgccgacagccatactccctccccactaagtgcttcatcttggctgatgctgggagctaagcaggtctgggcctggttagcacctggatggaaggaatgacagtcattgagcttctaacctttcttggctctcttccttgttaaactgtctctctttacacttcatgtaatcaagttactgctctcagggctgggtgtgcagctcagttggtagagtttctgcttagtgtgcacagtgccctaggcttgagccttagtaactcaggaagcgggtatggtggagagagtatgggcttccagcactcagaagatggagtcatcaggacctgaagaccacatagtgagttccagactggccttgcctatatgagatcttattagaaaaagaacaggggtggggggtgggggtggagtttacctgttgccccacctacttgggaaccagtccagcccagcagtgagggccaacctgaacaacatagacctgtttccaattttagaaggaaagaaattcctggtcttgtttcttattcccagatggcaagaaaacaagtatttgcatattaaccatgtaatttgtattttctttctaaatctacaacacctatagatgccttacggtcaagtgcttccagtttaaatagattctctcctctgcaacctccagcaccttcagggtccccgtcggccacacccttagagtttgattcccgaagggcgttaaccaggtgagcattgctttcatgttcatgatggccgatctgcctgccagctctgtctccctaacactcattctctccctccctccatctcgctcttcctctaatcttgacatacatgtcatttgtaaagtgggagcacctttatggtggggtgggatgaggagagagcaggttatctggccatgctttgttccttaggcagaccagatagagcaccttgccacacttcttgcagtggaagcatccttgtactcaggcatgaaaattaaggaactccaccagccaatacccatctgcttctgtctcagggttgttcaagttacataatgtttccattcccaaacgtcagactgttgctcatgcgtgaggcttctgcagcaggctgctgaccaccaggactgcggcccatctgtcgctcctgtggactctgctggttctgattttcatgttcttgtgtatgttctttgggttaacttcagtccatcctgagtctcccctcctgagttaccttgctcaagaattgtctgaaataagtcagcagggagacagacacccagtgctgtcaagtgcttccagtttaaagttctaagattaaagtgtatggctttagctggtgaaattttcttctgcctctctcacataattcccatgtatttgaagtttctggaaaagaaaacaaatgcttgaaaccaaatgatgtagtttctcaataatgaggttagccctgtctaacgtttgcttcctgccattcagtcggctcccactgcatcactgtctcttttcttcagaggtctacacacgagtaaggactcaccactgacagctaaagtattttagtagagttcacagcttgtgcttaaccagtttaaggtcccagtttaacccccacactcagagccctgcaattgaaaacaaaattttctggcagccaggcatggtggctcacaccttgaattccacactttagaaggagaagcacaggggcctctgagttcaaggacagccatgcaggcctgtgttcttgtcactctccagagatgttgacttgtgtgtaacagcccgagtacttccaagagaaagggccccgtgtcatttacacttacactttactctgcagtcattgcacatgtgcgtgggttgtgtggggaagcatgtgtggcggccagtgagtagaaattagagctagaaagacccggccctggaaattaactcaagtcactaggttggcagcaagcaactttacctactgagccatctcacccccccccccactttgatgtctctttgataagtattgtagtgtatactttggtgctttcataaatgaatacagtgtatttagatcatattcacttccctataaatcttctgggcccttgccctctatcttcctcccaactttataccttataacttttatttatgcacatatatgtatatatgtatgtatacatatacatacacataaatccggaggttagagctgcccgtatgctctctggtatgggcatgcactggagtgtgacggccaagcatggctcacacgctagagaaaggggctctgcctagcagcagctgtcacctgtctgtccgaagcttctcacgcttcagtgttttacaatttattttatatgcgttgatgttttatctgcatgtgtgtctctgtgagagtgtcagatcttggatactggagtcatagacatttcagctgtcatgtgggtgctgagaactgaacccgagtcctctagttgaccagtcagtgcttttagccgctgagccatctctccagcccttcacacttgagggtttttgttttgttttgtttttttgggtttgtttgtttggttggttggttggttggtttttcgagacagggtttctctgtgtgtagccttggctgtcctggaactcattctgaagaccaggctggcctcgaactcagaaatctgcctgcctctgcctcccagttgctgggattaaaggcgtgtgccaccacacccgactcacatttgagtttttaaagaatgatttttatccatgaaaaacaaaactgccacgaaatcttatgctctcttctggagtgtctgaagacacactacagtgtacttacatataataaataaatattttttaaaaaaagaaaaacaaaacttccttcctgtatatataagatctatggatgttttaaagttacaaaatcaaagactacacacaaaaaataaagtcttaaggtagtatcctttttcctcctaaaggtaaaattaaaatatcttagtaaatattcctttggaagctcagatttttgcctattctgcgagttagtacactttaaaatatagttagtgccttatatctgaagttgtgtaggaggctggaaaatgggtcaactagtctggtgctttccaatcacgggcggccttacaaagagaaagatttaaaatagttatatgtagaaaatcttggtaacgctttgtgttgtatgaagcaagacattatcttctgaggcctgttgttttatctttttagtcgtgggagcatgggcagggagaagagcgacaagccaattccagctggaacagcccgtcccaacacgttcctgaggggcagcagcaaagacctgctggacaaccagtcccaggaagagcagcgcagagagatgttggagaccgtgaaacagctgacaggaggcctggatgctgagcgggccagcactgaggccgaccgaagcaaaacgagggagctaggtgagagggccctgggatgcaagacagacctcctattggctttaaattcagaagcaaaatacagagacaggactggcgaggtcattcagcagataagaaccctggctctgcgtctggacgacccacactcagttcccacaccctcttctgacctctgatcacacagcactcatgtaggacaggtacagtactcatacacttaaacaaaaaaataagcagtaataaagctaccaagacttgatgagtacattctgcacccacccctgggagcatccgcacagtgttgtcattgggtgtcaccagtgtctctccaaagctgtgccatcacagagcttccagtcctccctgtctgccatgctgtgacgacaaggtccttttcctttatgatcagtattctgactttctcacagtccttccagcccctggtcccgtggtcatcggatgtcagtgtgttcaaagccctgtaggctctggtagggctcacgttatccctgcttaacagagaaggtgtcagccgccttctccagcctcatctccctcgtcacttgtgtggggtttgtttgtatttagggtgcatgtgctcagactctggtggcacagtaacagttctctgtgtcttcagtctgagctctggatttttatcgattcacacacaccctgtccagttctttcttagaagaaattgagttaacttgcagaaacacttgaaacaggagctgatagataaaatggttttgaatcatcttagagttcatgatgatgagtagagatgagacagacttctggggtggagcggtgggaagcataggagagcggggcagcaggagcagccagccagaggggaggcgggagtggccagccagaggggcagcaggagcggccaggcagaggggaggcaggagtggccaggcagtgtttacacaggtcccacactgggccagtgtagtcagtactctgtcaagcaggcactcacccactgtgtgttctagaggcctttgtgggctcattctttaagcagttgcagggaaatcaaaataaagaaactgccaagctgtggctctaaaggttcaaactatccctaactctggtcatggctagagcgcagactgtggtattactgtgtacctctctgtcctaaagaaaagggcctttgattttcctttcatttgtctgactctgtcaaaccaatatccgtaagacacctgccctgaaaagccagcgtgcgagcacgtaaacatcaccagccaaggtccagttggactgatacttagtgttttatcttcttgctctttgatctcattcatagcaaaatcggaaatgtgtgcagtgccagcccctgacaagcctgcactgtcagaagaggaagtggagaggaagtccaagtctatcattgacgaattcttacacatcaatgactttaaggtaaatgctgacagtgaaggcagcaagcaactcttaggcagcccatgtcagagagcatggcagcttggcgtgacctaggtgtcattatgagcagataagacatggatttcgtaatccagcccttcagggttcagttggctcagctcttgcatttctgccaagttctctattttaaactgatgatctctgtcattcacaaatttaatagtgggaaaagagaatggattccagtcagtgtaaccgagaggaggctaaactgacggtggccttaaggagcagacagcagagtaccactgcggccactgctggccccgtcccacctgtctgggcccttagacatcatagcatcattttcctttccgtgggttatgactgccatcatttttcctttgttttgtaagtgggaaactgaggcacaaaaggacagtgtgtgttcaggtcagaaggcctgagacatttcaagacaccccccacccccaccctgtgagcttgcctttctgacatctcctccacctggactctttaagtgatggttggtaggacaaacctcttgcctgaaaaaagccacagtccagtgacagacagagcagtgcaggtgactccacagatgtcctgagctagaaggggtgacggaagatcgtgtgacccaatcttgtttaccgctcaggtcagaaggtgtctcttctgttaaacagctgctagataacttacacttttgctttggtattattgaaaatcttattattcatttttttgaataacctaaccattatctgctttttgtacacaaaatcactttgattatgtctatccaaaccctgaaaccttccttcacacctgtagtagccagcatctggaagtgggaagaatggtattctagagggttttgtttgttttcagtttcttttgaggccttgtgcaggccaggctagccctaaactcactagccaaggttgatcttgtccttttaatttgcctgcctctgcctcccggttcctggatatgtagaggatgttgtgttgtgttttgagacagtgtcttgctctatagcccagttaagttggagcacttacatgacttagagctgcctcctgcctcagcctccctttcctggagttgtagtcatcagcccccagaccagccagagaaagcttttggtgatgttaaaggtgaagggatgagtctgcagacctgaccctggaacggagtgagccttgaatgaacagcagagggctgctgccctgcgcctgctcagcctccttcctagacagtcagcactgactagctggcagcaccttggctcgtggagaaacatgaaaggcaggagagcctgcagagtgaccgcaggtgacacagcagtgtctgcagagttagatggccaaaaagaggcttcgtgccatgtgatgtcagctcaaattgaactccccaagcacaaagctgcagtgtacttcagggtcagtagtggacacgtgaggacacctcctcgccagtgtaagctttctgagtatgtgggaagacacaaaagtaacaactaatgaccttacaaaggtagataggttgtactagataatttgacctgagcactcaaagtattaaataacagaaacgcagatagagccgcctgcgggcactctcctctgctgtggtcagtggccacctttctcacctctgtcctctcaagaagagcttgcttcagaggttgaaggaaagggaaggctgctagcaccgtgattgctgcgaactgcatggccagccaagcaagctagaccaataggctttgtcctccagtccagagaccaggtggatcactccacaatccatgtaacttcctgtaatagcagacctctttggtgtgagattgtgcagtactgacatcccaaggcagaataaccccagttgccacattaagttcttgtttgttgtttgtttgtagtttggtttgtttagggttttttttttttacagtgtttctctgtagcactgtttgttcttgaactcactctttagaccatgctgatctcaaattcagatctacctgcctctgcctctgcctctgcctctgctcttgcctctccttccccctccccagtgcctagactaaaggcatcctctaccagtcctggctcacgttaaggtcttttaatcttggtgttgttctattttacagtatctcgttttcagagttttaaagtgatgcaggttgacacatactgttacatcctccatatacattatatgcatatatgaatgttaaatacaataattttttggctttggtttttacaacagagtctcatactgtagaagagactagcctccaacttgtggcaatctgcctatctcaacctcttaagtgctaggttagaggtatgaaccaccaaactcttatttggaaacgtactttgggctgctggagagatggctctgtggttaaaagcactgactgctcttccagaggtcctgagttcaaatcccagcaatcaaatagtggctcacaaccatctataatagaatctgatgccctcttctggtgtgtctgaagacagctacagtgtacttatataataagtaaataaatattgaaagagagagagagggggggagggagagggagagagagagaggaaggaaggaaggaaggaaggaaggaaggaaggaaggaaggaaggaaggaaggaagttagttagttaacccaggagctggttcagcagacagggtgcttactgctcttagaggatccaggcctaatactagctcctacacacatgtggagtgtatgcagacattcaggcacatgcacatacgtacatgttaaatacaaaaataaatctagaaaacaacaacaagagtcaaagctctgagaggccatcccccttgggaaggaagttcagcgtttcactgcattacctggtctcaatttcagtctggattaaggcaatccttctgcctcagctttccgacttgacgaacacaggtgtcatgatgtgggaccttgttttgtcaccctgctagagccttgaactcagtgtgcatcccaggatagatttgaactaaacagtcatcctcctgcctcagcatttttagtgtgtgtgttgccacacctaactaaatcagtatttttatttctctctactttttattctagaaatttgcgtatagcaccctttttaatattaaacaaggaaaaaacttacattggaaaactgtcttgtttgaaaagccttatactacttttaatatatttagattttgaagttaccataacatcagattttggaacaagcctttatttgtttgaacaggaggccacgcagtgcatagaggagctgagcgcccagggcccactgcatgtgttcgtgaaggtgggtgtggagttcaccctggaacggagccagatcaccagggaccacatgggccacttactgtatcagctggtgcagtcagaaaaactcagcaagcaggactttttcaaagggttggtatccagtatccttacacctcagctgctaggtgatgtctgccatcctggcctctgtgtcactgtactgttctgacctcacatgcagtgttgattgatagaaccgcggtttgtagactgggctaagacactcatgttatcatctgattttctctgagacctccatccggtgtctggaatggaaaagaaccacagctcattcattcatcacaaggctttaagtcagtgaacctcaacttttcctcatgagattgttgagtatgtgtttgccctgtagatcctgtaggtttctgtgaaatgaccttgaggtgtcagagattgctgtggcccagtctgacttgcagctcctgttccctttgcagtggccctgctcactgccgtcctgctgccctggtgctgttttagttgcctgcaccctgagtcatggcagaaaagggctgcccagctaactctgtggagcccgcctccctcccacctccctcgtgctgcctgtacgtttctatgttttcacaagttagagggtcagcctgttctgcatggggaaacctagcaaggacggccctgccccgctctgcagtctcgcacctttgggaccataagctcacatctgagtgcatccttattgagtttctgctctgctctcttccattggtcgctgtgttctcacccagtgctgtcttgcttacagctgctctatggtacttgtttgaaagcacagacagtttcttccgaggcctgcactagcctgctgtctgagatggcttctcttccctttggtttgcatcgctgtcgaggtcttctccttctctgcttaggctttgacccagggattgcctccttcggtcgtttgctgttggtgtgcagagcgcagtgcatggctcagggctgctccctctctttcactcagcccataggagatactagttcagcagtgcaaacagaagcaaattgcacgactgaggtattgcttctaaaaggattgaacactataaacttcaatacctatgagctgcatctatgaaacactatgataaggggggggaagtcattttataagcagtaaggatttgattcctcactgtgttttgtaaactgctctatgatgaactagctgaatgcaaagtggaaacataagccaagaattcagaagtcttttagttatgatgtgagatgaaacaatgttttgtttaatgacaagaaaagttcagttgtctattgggcacattatgtagcttaccctgtgcagagtgtccaagaacattagtgatttacccagaaatccaggtgttctgccagattgtgtcccccagtgacatatcaacagctgactgtgcacgtactgagagcatgtgcaagtctgctccattggggtggatgtctgagcattgcaggctatgannnnnnnnnnnnnnnnnnnnctcagccccataggagatactagttcagcagtgcaaacagaagcaaattgcacgactgaggtattgcttctaaaaggattgaacactataaacttcaaatacctatgagctgcatctatgaaacactatgataagggggggaagtcattttataagcagtaaggatttgattcctcactgtgttttgtaaactgctctatgatgaactagctgaatgcaaagtggaaacataagccaagaattcagaagtcttttagttatgatgtgagatgaaacaatgttttgtttaatgacaagaaaagttcagttgtctattgggcacattatgtagcttaccctgtgcagagtgtccaagaacattagtgatttacccagaaatccaggtgttctgccagattgtgtcccccagtgacatatcaacagctgactgtgcacatactgagagcatgtgcaagtctgctccattggggtggatgtctgagcattgcaggctatgagctcagacccttgacatggttaggatgcctgaaagcctcagttcaaaatggatctgagctacacagagtgggattacagtggaaaacacccatgttacacaaggacttggagccaactgttacctgctcctggcgtgcccttcatccctccttttcacatgactagcagaactgtgtacacacacacacacagagaagccttttttcctgtttttgatacatgtcaagctctgttgctcaagttaaactaacttataaccctctcaccttagcttcccaaatagctgagagtttggaagtgtgtccctgggagtatgggagtgtgtccttgtgccttagttatatatttaattcacctttattttacattacaccaaaaaaaaaataccaacatttgacagcacagaggaaggtctggaaatccttacactagcacagtgtaatacagtgctacaggcttccagctttccctccgtgtgtatctctagcatgctgagtccttctccctccctgtgcttctggctgcgtggttacatacattgcgtctgtgacttttatgatagctgttacccacacttcacatggctatctgaaaatttcaggagtcattgccatacaggggtcttctcagggttcctgcagtgtgcctttacctgtctggtctttgtcttcccatactagtgtgagaggcaactgagattgcttacgctcctctggggctgggccagggccttcacacaaaggtattcagtgggcagaaacttgttgctttactgattttcgtctctatttaattttaacttttaaattctatttgcagtgattttttttttgcttcttgttcttatttcagtttttctgaaaccttggagttggcagatgacatggccattgatattccccatatttggttgtannnnnnnnnnnnnnnnnnnncttacactagcacagtgtaatacagtgctacaggcttcccagctttccctccgtgtgtatctctagcatgctgagtccttctccctccctgtgcttctggctgcgtggttacatacattccgtctgtgacttttatgatagctgttacccacacttcacatggctatctgaaaatttcaggagtcattgccatacaggggtcttctcagggttcctgcagtgtgcctttacctggtctggtctttgtcttcccatactagtgtgagaggcaactgagattgcttacgctcctctggggctgggctagggccttcacacaaaggtattcagtgggcagaaacttgttgctttactgattttcgtctctatttaattttaacttttaaattctatttgcagtgatttttttttctcttgttcttatttcagtttttctgaaaccttggagttggcagatgacatggccattgatattccccatatttggttgtacctggctgaactggtcacccccatgttaaaagaaggggggatttccatgagagaacttattgtgtaagttgtgtttgttctgtttaatgtctgtcaaggtaaatgagtccacacccttccccattggcccctctgcacactcatgggcacagcctatagctgtttagcattccttttttaatagttatttttattttatgagcattgattagtgttttatctgcatatatttcttgcaacagtgtcaggtcccctaagattggagttacagacagctttaagctgccatctgggtgatggaaattgaatccagggtcctttggaagagccgccaatgttcttaacttctgagccatctctccagcctccttagcctccattgtcaaagggaaattgttgcattgtctgtagttgaagtctgttttaaggatctgagagacccttggccctttggggtggccgtctcagatcagagtccgggaggagattatttccggatgtttcttgttagtctgggtttgctctgccctactgagctgcaccgttgtattagaagctcacagttattctattttatttttttagttttggtttttcaagacaggatttctcagtatagcgctggctgtcctgtaacttgctttgtagaccaagctggcctcaaactcagagagatccacctgcctctgcctacaagaactgggattgaaagggacagcctcaggttagaaggacatcctgccctggttgtgaatgggcatcagtgccaccttgggttactaactagttcttctctcttcttcacgacactgttgtccctgcagcagttcttgagcctcctcttaaaggttcacaaaatatatattggcactttggggattgtgaagtcttcatggaaaagcaaaacaataaaaacagtttaagcatgatcttggttaattaaaagaacccttttttgaggaattatgatattaaccctagagaatttaggaaagacttgcttcactctgaaaataccatagaaacaagaaaattctgtcttaagtctgcttgtgcctgagccttaactgagcctcagcctttgctgtgacgccgtgggtaagtaagaggcatcctctccacttgagccattgaagtgcttacgtataaagacagatcctgggcttctgcgccctcctcctcctccactgaacttgaggtgaccagcaagtctgacgggctggcccgagtcctgtgtctgcacggaacagaagcgtgccagtgttcaccggctgctcctgtctttacagggaattcagcaagccattacttcctgttggcagagctggggtcctgctttctgaaatcctacaccttctatgcagacaaatggtgagtgccaacagtgtcagaccctttgaccacgtggtgggaagggcggtgacagcagtgagcttgggttctgtgaacagttccaggctcggtgtacaagtattcccgtttctttttgaccgtgagagaagagtatggccactgcttgacctggcttctgtcagaggtacatctgcccttctgttaccaacaactttgggaagaattacccaatcacagctagaaggaaagctgcgttctaagcagtctcaggctacatgttatttatgtcttgttttggaacaaaattaatatattacttttaataaatgtcaatttaaaaaactttgagagtggggctggacagatggctcagtgattaagggaacttgctgatcttgcagaggaccctggttcagatcctagcacccacatactgacaactgtctgtaactccagctccgagggttctgatgcccccttctgacctacatgcagttaaaacactcattattcataaaataaagattcacaaaatggtcgtcactcttaatacttttgataaagtactggtacagtcttcttagaaataagtggtaaaatgatagtgcaggagagttaattctttcagtttatcgcagttaaatatctgttattccaaagataaatgagcctccaaagtctgtgtaggctggaaagggagagagccagatgggaacctgtcaagaagaagtctgtggggcttcacaaaagtgtctactagaaaggggatgttggcacaaagcagagctcccctgaagatgctggggttcttgctgggatgggtctgagctgcaggtctggcgtgctaggttacagctccgtgggtttgcctttcaagttcttaacccagggcaacctgctcacgaccagagcccttctgtgttcattgtgaagctgtgtaaaatggagagatgctttcaacagcctgcttttggtgacttcctgttttgtgataaaactctcccatatagcactaaaatgtttactgagctattcttttaaattcagcattccttcttcagccttctttagttcttacttaaaatttaattgctataaactttcattttcagtaacagaaactaccacccacttctaaacaaaaccagatttttgatgaattttcatttggttttttttttgtttttttgtctttgtgtttttgtttttggtgggcttttgtttgtttttgttttttggtatctttatacttttttttatcatttttgagacagtctcaggacacagctagccccaaattgatggcagtcttcctgcccaccctcccaagtaatgcgacttacaggcatgcaccacactgctcagctaaaaccaggctttttcttggtcaagttgtgtgaggtcctcacctcatggcctagtgttttctcttacactgtgttcatgaggtggcaagcggacctgcttgtgtgtttccagctgagcaagactctttttttttttnnnnnnnnnnnnnnnnnnnntcctcactgtgttttgtaaactgctctatgatgaactagctgaatgcaaagtggaaacataagccaagaattcagaagtcttttagttatgatgtgagatgaaacaatgttttgtttaatgacaagaaaagttcagttgtctattgggcacattatgtagcttaccctgtgcatagtgtccaagaacattagtgatttacccagaaatccaggtgttctgccagattgtgtcccccagtgacatatcaacagctgactgtgcacgtactgagagcatgtgcaagtctgctccattggggtggatgtctgagcattgcaggctatgagctcagacccttgacatggttaggatgcctgaaagcctcagttcaaaatggatctgagctacacagagtgggattacagtggaaaacacccatgttacacaaggacttggagccaactgttacctgctcctggcgtgcccttcatccctccttttcacatgactagcagaactgtgcacgtctcttgtctccagtttgtacttttaaaaacagctgtatgtgaaaacagttggacaagccctgaactgtttgcactaagtcagaggttacagtttgagcccacttgtgactgtgtatacacacacacacacacacacacacacacacacagagaagccttttttcctgtttttgatacaggtcaagctctgttgctcaagttaaactaacttataaccctctcaccttagcttcccaaacagctgagagtttggaagtgtgtccctgggagtatgggagtgtgtccttgtgccttagttatatatttaattcacctttattttacattacaccaaaaaaaaaaaaaaaaaccaacatttgacagcacagaggaaggtctggaaatccttacactagcacagtgtaatacagtgctacaggcttccagctttccctccgtgtgtatctctagcatgctgagtccttctccctccctgtgcttctggctgcgtggttacatacattccgtctgtgacttttatgatagnnnnnnnnnnnnnnnnnnnntcggtcggtctgtctgtctgtctctctctgtctctgtctctctctctgtgtctgtctgtctgtctgtctgtctctctctctctctctctctctcacacacacacacacacacacacacacacatatttcagtaacggaaaatgagaaccttagcaaagacagctttttaatctgtgttttaaggctcctctatcagaagaaaatttaggtgtcaggggtactgtgtccatcacagcttgagaacagctctgactagccaagacagatgcgtgtacaacagagtttgtttgggcgacctgggctctctgatggaagattgtagcatcctggaagctcagcatgtttgtgatgtgatgtcacacacagatgaacaaggaggcagagttagctcgcctcagtaggagacgtctctgtagggagtagcctacaagccgtaagcatgttggagaaaggccgtggaggacataccttcctatgctaccagtattcacacatggcccagataggaagggttagccatttccctctgggtctgaagctgtgggtccctgacatggcatttacactctcagggcttccttcgttccctaacatcaggaagctatgcaggcaccgaggagcttgatccccaacacccattggaaaatgccaggtcatggtgcgtacttatctcccagcgctggggagtcagagagtgaaagatcaggaaagcttgctggctggcaagctagcctgattagtgagttccaggccagtgagagaccctgcttcaaaacaaagtagatggggtgttccttagagagaaacacaaggtttttctctggccaacacatgcatacccctacatgtacacatgtacacacatgactacacacacacacacacacacacttaaaagagaatacttaacagatcccataatccagaagtgaacttgctaagaggagatgagttctctcgcataagctgccagtgctctgagctctgtagacaggacaaggctatggtgccacttagaaggcagaaggttctagagaggcttactgttcccaaccccataagtaataattggagggaccctaaaactagaaccttgccaagcttgcctctgatttgacaggaaatgcagacattgacaagccagagtgcagcattggtgggctctgtactttcatactaaacaaacaaccagggaggaacgctaggttgaagctgttctcaagtagaaatgacaaagctcttacaaatccaagtcctgaaacacctgggcttgggcatcgcaccacacatggaatccccgtcctgggcctgagctaggatctgcaggctgaaatcagtcagggctacatgatgagatacttcaggaagcctgaggaagctaaagcatgctgtagcatagtcattaaggacataagctgctggtgcacatagccccagaactcaggagtcagacagggcatctccgtgaatttaaagatctccgtccagggctaccctatctcaacatacagaaaagaaacacagcagattaagataagtccaggcgttgagcccattcctctgcgctctgtggtgattgagatgtgcactatgggaaccccagctgttgaggagactgatacaggaggatgacttctttaccaggaattcgaggccagctcgattagtagacctaagtcaaagcaaggaagtgctgtctgaagacatcgtgtgggctgccgtggactcactgcagctgtagctgcagtctaggtgcactagggatgtgctcagtacagcctgcagctgtagctatggccgccccttgacctctgccgcccagtgatgggtcatagcatatgctactatacccagcgcaactcaagtatgtgtaagtcaagtatgtgtaaattatacatggaacatattcactcctctttaaagatttatgcattccttttctgtcagagtgttacacccacacgtctgtgcaccacatgtgtggctgttgccagagagggcaccagatcccccagaactggagttccaaacagtgaggagtcacgagttgtgtgctagaaacgacgcccaggtcctctgcagctcagccaaccaagccatgtcctcgccgaccccacccctattttttaatacatattatctaaaccacgaagagttcatttgcctagagtgaaacaagggaccacgaggaagaatgagtagtacgcctgttacatcgctcacttatatttagaagaaagagaaagctataaatcaatttgagcttcagccatataaagtgcaagctgcaggtcaggtgacctgtgtgttcaggaggctgaagctgcgcaatggtgtgaacctggcctgaggtacacagctgagcctgtctcagtcacaaaaggcagatgtgggagaggagggggttgagtgtgagttctgtgagcagggcacttgctgagctgggaagggcaaggaggaggcaggagagagagaaggtggacacaggccagtctagtctgagtggcagaaaggaaactgctaagccagccttgcacccagctaggcccagctccatgagactgagggaaggacgtctgtgagtggatgaagccgctctactctagccaggcagagcaggagcaagtcagagaaggcagcagggagcactactacaatgggacaggtgtcactgaattctgtcccaaagcgtgaggagaacgcctgagtgcctttcatgcagtacacttgttagccttcctgacgtgaacaaatgcctaggacagaaattgggtttgtcgttcacagtgtcctctacagaacactcaaggggccctggttttaaagactaaatagtggactccagagtgatgtcagttgtagaaaaccaatgaaggccacccatttccctgaagccacacaagccttggtccctgcactgatcggaatggtctgatctctgagttcaaggctagcctggccacatagtgagaccctgttgaaaatttgttcttgaacacaggaaaatgaagtgattgatccatatcaacctgtgctgcaggctaagtcaagggacactgggaagtagtgtagaatcatacacagttgttgtggagctgtcagatcggcatctggctacagttgcttgcccgttgttgatggtgatttaaggcacatggagagaagcatggtaacccagtccttgggaggtggagttagagggatcagggattaaagttacccttggcagcaaaatgagctggaagccagcctgggctgtgagaccctatgtcaaacccagcagcagcaaaagatgttacagtgaacgcaaaatgagctggaagccagcctgggctgtgagaccctatgtcaaacccagcagcagcaaaagatgttacggtgaacgcaggtctaacgaaagcctcgccctctgggtaccagggagaggtaacttacaggctcgaagtgagcactgcctttgtcagtggtaaagttctgttttcaagcccccgagccatctctctgtcccctaaatacaatctttttgaaaggttggaatctcatcggatactaatgaagtgacagcctttgacagttctgtcacagtggctctgttgctcattctctcaggccgagcgagactatggctgcccttcctctccatgtagtcaccacagtgaaaatcccaaggcctcgtgtagttgccacggtgaacaatgtcagtgtctcacgtttgcttccagaagttggacttcacggaatccgaagggccctgctcctctgaggcactgtcaaagaaggagctgtctgccgaggagctgtctcagcgcctggaaaagctcatcatggaggagaaagcggatgacgagcggatctttgactgggtggaggtacagacacgggctgtgctctgcggtctctgcagagtggccattgggtcctcagagttcacattgcccgtccttcatacctattacccttcatgcaccaggggcctttgtgcctgtatgtatgtggtgtctttgaaattcaaagaccggttttataactgctcagttgtttttactctttctatttttgttgttagatttttgagacagggtctcattatgtgtctggatttcactaagtaaaccaggctggcctcaaatccatgcccaggcagtttcaggcttgcttgcttgccttctttttttatactttgcttgttatgtatacagcatctgccagcatgcatgcctacacaccagaagagagaaccagccaccatgtggttctgggaattgaactcgggacctctggaagagcagtcagtgctcttaaccactgagccatctctccaggcccgcaatttcagtctttaacatgtaaaacctattcaaagcacaacccatttctctgggttcattagaattcattccacattctgtcacttgtatactatcccagataactttaattagcggcatgcagctactatgacatacatgggcttacattttcatggccttagtcttagagtctgccatgtgtttagcctgtttgctgtgttctttaagtagcagtgcttttccatgaagagcacttaacatgctttttatgaggtcacagaagcagagttgaggctacctcttttaagtctctcttctgctcttctagaatctcccttagcccactgtgtatgtcagctgtgagctttaaccactccaggcactgagaaatagagaccctggctttctccctgtctgtacagactaatcttttcttgaagtctttcgttctctcattttcaatcactgctagagagagagagagaaacttagtgttttattctttgtgtatgtccacaccacctgtatacctggtgcccaaagacgccagaagagtgttagatcactagaactggagtcacaagttgttatgaacacccatgtaggttctgggaatcgaacccccagtcctctccaaaaacagcaagttccttaactcctgagccgcctgtccagcccttaatcactgctttttcatgtgtgggtggcagccccgaatgaggatgaggatccaaactctgaggtttctttggctgagaggggggttttattgtttgtttggtttggtttttctttggtttggtttggtttcgatttttagtttttggtttttggaaacagggtttctctgtgtaaacagccctggctgtcctagaactctttatagaccacactggcctcaaacagagagatcctcctgcctctgcctcccagctgctgggattaaaggcgtgcaacattaccacgtgaccaaaccctatctatctatctatctatctatctatctatctatctatctatctatctatctatctatctatctgtgatttatttatttattttgtgtatatgagtacattgtagctgtcttcagacacaccagaagagggcattggatccccttacagatggttgtaagccaccatgtggttgcagggaattgaactcaggacctctggaagaacagatcctcctgaaatctttatgtcaatatccttatgggttattcttaccaaaagacagcccaggcttcctgcattcctttgaaagctgcttgtggtgtctgaacttggtcagcatctggcagccagcataggtcaggaagtgtattgcataggtagtgctgagacagtcacatgttacctggggtggccttcatactctgtctccaaagaccacctttaggtcctgcttctcctgccctacttcccaagtgctaggttctatgtggacagcaccattcagctcttgctgtttgtactcaggctctccctggaggccctccctcccacaccaaactcaaacctgtcctcagtcaggtaccattccagtcttgagcgcgctccagatttgggttcggtcataatatttgctgctctctttacatcatcctcagatttatccatcagggtctgaggggaactgaggggaccgtgggagtagattggtctcaggacaaaactacagttgtgactacggctctcccagtccttgggacactgctgtcccttagcttattccttgtcctccacttggctttgtggtcaccatttacattgcacccacaggggactgtctatcattagaacttcagaagccttgctggaactcaggaaagatccctctctgagatgccgtacactaatcaaattaagatggaaggttactttaacatggctacattttttgaatattactttctagtgtgactacagggtctctgcctaccactgtaacaatcagctatgaccaccagctagggagcagtctgggagacaagaggcagttagttcagtccagtgtgacagagttcaaatgttgggactctgaccccaactagtttattttaggcatatttcagtacagcgcaatgtggctaagactttcctggtaagaataactcaatctcatatatacaacaaagcttaaaatgtgattatatcaaacctttgtaaagtttaccttccatagcttctgtagattgtgtagattgacaagcttctagtgagggtagagcccaaacggtcaccagtgtccagtcccagccctttgggaggctaacaggtgtgcattctttgatttgaaggacaaccacatgtgctaacattcctggttcctccagtgcttctctgtgactcccacggcataaccattatctctttcctagtctttttcatctatttatgtataatttattcttggaaggtagctaagctaactactatgccaccgcagagttaattcttgaactcagtagcctcagccttggcctggtatgtaaggcatgccagatgttagagtttatgttttgcatcagtcccttcatgattttccatatgtaagtgattgtggtaattttacttttttgttactgttctttaaattgtaaaactttattataaattaatacttttccttaccaaaaacattgtacacatttgactgctcttatgttgtgatgtgcagtggtttctttagaattcaagttagttttgttttgttttgagaatttatacatgtcatgctattctttcccctcccccaactctccaaacctcccttcagtgcccactcagcttcagagggtgtttggttgattggatggttggtttgttggtccttctgagaaagtttctctactgtgtagctctggttgtcctggaattcactcagtagatcaaactggcctcaaactcacagagatctgcctgcctctgcctcctgagtgctgggattaaaggcatgctgtgccacaccctcctccttcatgttttatgtctgtgtctgttccagcaagcaggcttagcaggttcccatctctttccaactgttagatgctggaatttgggtaattggtcttatttgtacaaggtaggggcaatttgttttcttgtatccctggagaagggaagcctggtgcctcgtgattgcgtgcagagtaagaagctcctcccaccagagtggctgccggccagagcgttttcatagactgcacaaatccattgcaataacataccttctgttttcccctccaggctaatctcgacgaaagccagatgagttcgcctacattccttagagctttaatgacagccgtttgcaaagcagctatcataggtgagcaatgtttgttgagagtagttaagaatatctgaagtacaaattatcggctttatgttgtcttgaaacttgaagtttcatcatgtcatgccacctgctgtggcagtcatgggggcaaacagttaatctctccataagaaccaggtctgaatctagattttgttccttcctcttcatcctcaaggccatgtcttctattcatgaatttgaggctaacctcaaattaactgtgtagctcaggatggcattgaactccttattctcctccttatgccttgcatgtgttaaaattacaggtatatgtgaccaattctggcttatgagttaaataaatatcatgttgtataaacatcagtactatatgaaccatcaagctatagctccatctcctagtttggttttattgcatttttaaagtattggcttaaattcctacattattaattagtaatactttaattgacatgacaaattattatagtacatatttgaatattacacattgtaggatacacagtgatttttttaattaatttttttaattaggtatttttctcatttgcatttccaatgctatcccaaaagtcccccataccctcccctccccacagtgatgttttaataagcgtctacaatgtggacagtgtttagatcaagctagtcagcatacctgtcagctctcttgactttatgataagacctttgattaccttgaatctcttacgttgtcataaagtcttggtactgtttcattatacttacaaataaatgggtaaaagtctgaggggagtgtgcactcagcatgtttcccgccccctccccatgttttgtatcaggttttataaaatggaccattaaaaatgcactggtgccagaggcttgtagtcccagctgtctgcaaagctgaggtagcaggatcaaaagaaaaggggcctctaaggccactaaggaaattagtgagatgctgtttcaaaataaaacatccagagagggctggggatgttagttagctcagtggaaaatgcttgcctggtgtgtgagacacttggtccagaccccagtaccacccagcatggatagtctttgctttgggcccctttctcaactttcctagatgtgcctgtctgtctgctgtgcttagaacaccagaatggctctgtgataacacctggttcttctgcccctccagctgactgttctaccttcagagtggacactgctgtgatcaagcagagagtgccgatcttactcaagtacctagactcagacacggagaaggaactacaagcactttatgcactacaagcatccatagtaaaacttgaccaacctgccagtaagtttccatcttggttccccaattggggagaactggaggccttgaaagatgatttggagttaagacatggcattaggttagggaggcagaggccgttagatctcttgaatcccaggctagcctggtccacagagtgagttccaatacaacctgtctcgaagaaaacaaacaagcaacagaagaagtagtagttagggacaaaagagatggcttggtggttaagcacactggctgctttttgagtggaccctggggttcagttccctgcacctacaatgcccactcccagctatctgaaactccagtcctaggaggtcaagcaccctcttctagtctccatagccaccaggcatgcacgtgggaagatggacatacatgtagacaaaacacccacacacagtaaaatatttgaagaacataaagtataacttgtgggtggccagctcttccctattgtcccagcacatggtgtggctagggcacgaggaccataacctcaaggccaccgtgggctacagcatggtgggaatatacctgaaaaccaaaggaagaagtcaaagtagtgtagagcgctggtcctctccataggccaggtctatgggcctccttcacagggtctactctacgccatgtgcaagccggacaccctaagatgctgtggccgtggtgcaggctgagaagtgaatcttgcattttatttaatctccattaagtagccacatgtggacatactagatacatatacaacagccttgagcatggctgatgatctcagcaccctaagccactggtgtttaccaaagcatcagttatccaggcacacacatgcacgcacccaccctggtgttagatgctgtccagtgaactcttaacatctgcaggaagtttcacagactgtacacatgtctggagaggcttattgtgcgatggccccgagtggtccgcagatgctgtggcattgcgttgcttttcgtctttgaaagtgaaagtgcagggctggagagatggctcagcacttaagggcactgactgctcttccagaggtcctgagttcaaatcccagcaaccacatggtggctcacaaccatctgtaatgggatcctatgccctcttctggtgtgtctgaacacagcaatagtgcactcataaataaaataagtaattctttaaaaaaaaggaaagaaaagaaaaaagagaaaaagtgaaagtgctcctgagtctgaaacaagttattctcagagtttaataacccaagaggcgtccagtctgaatccagaggtatagccgatctcctcctctcaccagtatgtaagtcatttaacagggtggcagcttccttttctgagttgtacaggaggggacactagcttctcagatgacaggctgtctgatggagttggtgctgggtttacagtaggcctcctccttgtggagctgctggttgggaaaccggcccccatcagacttgtggcctccctctccatttccctgttggatatccagagctttgttgttgttgttagtgggagggaggcgtgatttatttcagtgttaagataatgtaattacaaatattaatctaaaaaagtttaatatggctctttctgactcgttaccaaaatttcttgttcatcatggcctcctccgttagtgtgatggtcaggaagctggcttccagcgaagcacataagtcacgtggaatggtgcacacatttatctcagcacttggtgggcagaggccatgggtctcttgagaattcagggccagcctgttctacataatgagcttgtggctagcagggcaacataatgaaaccatatctcaaaaggggatttaagagtccaaaatctagcccttaatcccagcacttgggaggcagaggcagggggatttctgagtttgaggccagcctggtcaacagagtgagttccagggcagccagggctacacagagaaaccctgtctcgaaaatcaaaaaaaaaaaaaaaaagagttcaaaatctagagatcaactctgcctgtgttgtcatagaaagtcagtctttgtttttaaatacagacttagaaaggggaaagttatacttgttggttttttttttttttttgcctctgcctcctgagtgctaggactaaaggcttgctccaccaccagcaccgttatatttaaattttaagtgtttaacttgataacaacataataacaaacacctttactagtatccaaacatagttgaatttgaacaaaataagaataaaaagtaatgttttgtctgcaaatgagtgttacattgctcagcaccaagagggtatagtgcacagtcctagggagtggatgttcattcactgtgctgattgactgcagccattcattcattcattcattcaccgaccacattcagtcactcactaattcacatgtctttgcttttccttgcaactacaatgctcacacctgcggctgttgtcacctcttgcagacttgctccggatgttttttgattgcctgtatgacgaggaggtgatatcagaggatgccttctacaaatgggagagcagcaaggaccccgctgagcaagctgggaagggcgtggccctcaagtctgtcacggcctttttcacgtggcttcgggaagcggaagaggagtccgaggataactaatacttcaaatacacaaacgaaacaaaagaaacaatttaagtatttttttaaaaagtttcacgtcttcgccaatcacagtgcagcaaggccaactctcgcagaaaccccacgtgtgcgcgagtgggagaggggacaggaatcaggtgatcatggaggataaaggtcctggaacaaggaaacagcaaacccgagggcgggcgctccaaaaccaaaatacatgtactatttatagaaaatattttctgttttaatcttttctttttaaacgaggactcatactttaaaaaaaaaaaaaaaaaaaaaacacatttagcaaaaaaaaaaaaaagaaaaaagaaaaagaaaaaaaaaaaacagttgaactttaatttattttaaggactgcaaatgccagtgtaatttttttaatttgcagtttctgtaaacaacttgtataatagaaaagcagagaaataaatttcccttcccttcagatgcaccgcacatttgtgttaaggcatagctgttagtcccgatttgagaaggtttggggtgaacgaggtaagaaagatcttttttcccctccccccggcccttttcttgctccactcccagccctatcttcagatctttctgcctctcagcttgcttcagaaaatttaaaaatcacactagtaatcaaaacatacataaccttggaacagaaggaagtactgtggaccagaaaaatccaagaattgttcaaaaaaagtgctaccctggaaaatacccttaataccgttgaaatcgttagagtaactttaaggcttgtaaatacatagaacaaatatttaaaaacataaaaaaggaattgactcaatactatttcttttcactttcaaaatataaggaacaaaataaagacgagcattgcaagtttaaaataaagacttctccttttgacagccgtcagctgattcccgtcctgggaggagctaggtgtttctgacggggtgtgtgcgcgtgccatgtgtgtatctgtctgttatggatacagagggtgccaatgcctaggtgtgggtgtccttggagtctaggaccagcaaacctgaaacagtccagctgtgtattatatattacaaccctgggtagcaggtcccccaggatgaccattgacttttaaatcccatcattcagtaaagagtcccaaaggagtgctggagaaggttcagtggttaaggtcacactgacccactgaccgcttttacagaggagccatgttgagagctcccagctctcacaggccgctcccaactgcctatagctccatctccaagacatccaacgccttcacacagatattcgggcactcaaagtaacaatgcacataaaataaaagtaaatcatttattaaaaagagaatttgaaaggtgctctttaaggaatgtaaaaaaattggtccaacacatggtaggagagaatcagtttctaaaatagccctctaacctctgctcctttgctgacactcagaagggcaaacacacacacacaccaactcactcatgcccacacagtgcataaagtctaaagctaaattctgctttgtagtaggaatggagcttaaacttctgcactcttcgcggaaaacctagtcactccgctgaacttccttcaggcccttccgtggatgggaagcctctgatggacctgctgggtcttatgtcagccgcagtgactgggccgtttgtttctgtcccctttcatgaagtagcactaggagatggagtctgtctcttggctttcaccctacaaaatgagtttaggaacacagccaggcagatcccaagtaaatattctttgtatttcatgcccatataatctaaggtttatgctggcttctgtctaacagcgtccacaggaggaggagacctaccgccggctgagaagcagaccgtttctttcccacagtggtaaagtgcttgctttggaccgggctgagcccagctcagaaccctagcatatgcagccacggagcgcatccctccgtggtgaaaagccaagtgctaaacgccaccttgacaggcatgtgacagggtcaggaagcagtttgggagcatctcagtgccttggaagccttagttacaaatgtcacctggttgaatggttaccgttgtctccaggacccctgtgtagaagattcccacccaggaagctcctactagatgcaggctttctgaaggatctgacagcactcttcagggtgctggtagggggatagtgactacatctcgggaatcagtggctgttcacattcatcactattataaatacaaatgtgtaaaaatggagaatttttagtgtaagggttggttaaaaaaaaaatcaggttcttaacgtgtctatcacaatagcagaaatctgtctgggatgctgtccagtgcagagccatcacacagtgcaaggtagcctttgggtttattgatgctgtgttgaaatgtttgataaaattagagccatttcctaagcagcatgtccttgccccagcagtcggggctacaggagggaggcaggcagcctaacctatataacaagggggtgggttggggggggcacagtagctaagagacttagacaaatctgaagacagagctcagattccccaacacctccataaaagccaagtagggctgcatgcctgcttgtaactccagcactgtgggaggcagagtcagaggcaggaggatcactgaggctaactgaccaccagcccttctgcactggcctctgcatgcatgtacacatgcaaaaaccagatggtgtgcttcctttattaatctgtgggacacagaagacttgcttcacactcaaggtcattctggactacatagtgagttctagtctcaacaacatgatacgtgacgttctgaacaaggtggaaacagaacctgtgcttttgttagccctgcacagcttcgggattgctgtccttcgggcctcctcctggaaagcagagtttggttggatccagtttgaaatgagtatggcatgctcgggtatggttagctcctgcctttaattccaaggacatggaaggctgacacagaagaatagctgcaaattcacgggcagcctgggctaaagggtgagagtcgacctcaaggggaaacccgggctgggacgtcttactggtgagagtgcttgctctgaaggcttgggaaccagagatcaaatctccagcatccacataaaacggtgagcatggtttcatgtgctggcccagccctgggaagtggtggcatgctgatccagagtgtaccgagaccagccgcaacagtggacgtttcggttcagcaagagatcctgtctgaaggcagaaaggcacagagcagagctcctaagacgctgcatcctcatcagacctctgcagatgctgcctgggtgcgctcactacattgtacgcatgtaacgtgcacatgagcacacacaacctgaaagcaaggatagacagctggcttgcctttacgccttcaagacacccgagcagtctgagggctgcgggtgtgactcgctgctagagcacagcaccgtttcccacacctttgacctctcaagcaggtatagcatttcactgattcattaggtgtctctgcggcactgaaaacggatgacaattatccagtaatggaatagtcgaaaggtgtcctatttagggagaggaagatatgccagttttgaaaatagtaaactaattttttaattcttgggtagaccagtaagccaggtcacaggtcatgaggtagtttattgagcagctaatcacaggctgaagacatgggcagggttgatgtccctaggacgggtgaggccctaggttctgttcccagcaccaacatgaacaacaaaactacttagcatcttctaagagccgaaagtgtttgaggagttcctgttctgcctacaaacaggaagctagggagggactcacactgtagttacagttacagtatatattgttgcttagttgtcacgtggcggaaacccttgtttttatcacttagactgtgtgaggtgcaacaggcatgcccaaccctcaacttgagaaggcctggtaagggtggttttagagaccaaggtctcagtgagctgcccttggcctttctcagaatctccgtctgcagtcatctgactcaaggacagagcttgccaggcacgccattgtgtgaaccacagaagacacacaacttcagccaagagacttagaggatgaagtgccaaaagtgttgtcctgcatgtgtgagacccaggccctacggaggggcgggggtggagagagaggagagagacatattgttcttccagacaagctttttttaaaaaaaagcattttttatctttatgcatattatttatgcatataaatactctatctgcatataaacctgcataccagaagagggcatcagatcatattatagatggttgtgagccatcatgtggttgctaggacttgaactcaggacctatgaaagagccagtattttcaacgtcctacatagggaaaatgacaggaattcttttcccttccagggtgacgtagacaatgcagtgtgaaatgttaccctggagctggggaatcagcacagtggctaaaaatgctccacaaaaccaaggacaggagctcagatcctcccagaacccacataaaagcaaggtggttgtggaagcttgcctgtgatcctgatccccaagagagggcattcccaaggcaagatgctgagctgtggggtcagtgagtgaatagagtgggaatggttgagtgctgtgcactgtgcacttgaactagcgaagccagtgatagacagctgtagtgctagctgttcacaggaccgcctctctctacccccatccttggaatacaggttagagttaaagttaggcaggcatggcatggggaggaggaaggccgcacacgtctgcaatcccagcactgggaagtggaggcagaggatcaggttatcctcggcaaagcaacgggatgctgtctcagaaggaagtaggaagaccgggcatgatgactgccaccttttatcccagcactcagaaggcagataagcctggtctgtctacatagatgcaggacagggctacattggccctgtcttggaacaaaaaaaacagaagttagctgggtgatggtggtccatgcctttaatctgattacttgggaaacagatgcagacaggcctcttgagtttgaggccaacctggtctacaaagggagttccagaacagccagggctacactgagaaaccgtgtctcaagaaaaaaaaaaaattagtgggggctggtgttgagttgttgcctggatgactaaattgtactggaaacctcaagtcgttaccaatgaagcaacaataagagctcaaacaggcacgagtgacttgctgccttgaggcaacttttaagaaacatgaatttttttctaaagaagtaagttaggccatcaaagaagctggcagcaaaaatgaccttgataggaatcaagacttggtactaggaaagagaggggaagcctcggctgtctgcaggcggtccttacgtggcttgtccaaaaaggaagaaaggtgggtagggcatggtgagggtccactcgagccccacccctatgccctgagcgatttgaatagcccttctaagagcagtccagatgggccttttctgagcaggtaagagaactctgggattctggtgggcgataacccatccaacactgcagttatctgcatacagtggagctgacaacccccagtgcctgctgttgtataaatacgaacattcctttctctatatatcactgtcttacctgcatgtatttagctgtatcacaggtgtgcctggtgcccttggagaccaaaagagtgtatcagaatctcttgaccctataattagtaaaattataaataattcttaaaaataaatggagtattgggagaaaaaaaaaaccaatctcttgacccatgttatcaggtggttaggaattgctatgtgggtgctggaaattgaacccagacctctggaagagcagttaagtgttcttaaataccaggctgtatctccagcccaagattttgtttttcttttatgtgtatacctctgggcagagggatgggaagcgtgcatgagtgcaggccagaagagggtttcagatggcctggcattacaggcagttgtgagctgataaggtgatgtgagtcctggaaaccaaacgctggtcctctgcaaaaccagaaagcactgttagtctcccagccagctctctagctcccctgctccacattgttactgcatttttgttttccatacacagatgctactgtgttaacagttgcctacaagtgctatagcagtgtgccgtacgggagcatagcctagggataggagggtgtactgcacggcacaagtgtggagtgagccaccccatcaaagttggggtagtgaaatcgcccagaacaaactatacccttaatcttttttttttttttttaaataactattgctgggtgtgatggtgcaaacctttaatcccagcactttgggaggcagaggcaggcagatttctaagtttgtggccagcctggtctacaaagtgagttccaggacagacagggctatacagagaaaccctgtctcaaaaacaaaaacaaaaacaaaaaaaaaaaaactattacattcatttgtcttgtgctgtgtcatgaattacagaggtcaaaggacaatttggatgagttaggatctcacctcccactaagtgggtaccagggactgaatgtagtttgtcaggcttggcagcaagtggctgtacctgctaggccacctgctgagccaccccactgcccagaagcttcaggtccccagctgtcaacagtatttacaaagcaaagatggtagatggagcagcctactcagtttgctggaatttcctcggtttaaaaactgaaagtctggcccagacatggtggcatgtgcctttaatcccagcactcaggaggcagaggcaggaggatcactgtgagttcaagctcaacctgttctacatagttcagaatccttttctttcctgttgcacccagggcctcacacatgctagagcaagtgctctgcagagctacgcaccaacgctagcttgtaagcctttgtcaaaagctattgggcgtagatgtgtttcagagttatacacttctatttattggggttcatatgtgtaaacgtgggagtcacttctctccaaccatattggtttctggagctccaactcaagttgtcagcctgttggctgactcctttactagctgagttatctcacctggattccagaattctgagtatttctgtctcttcctttaccctactagtgattgaacctaggccaggcaaatagcctaccactgagctatatacatccctaaccctggaatacaaaagttttgagaagaactttcaaggttgattattatgctaaaaaggagttataactatggccaccagtaaacggagaatgtgtaatggggaggaagggtgtccaggcatactgcttatctggcgtcagtgacatcacaaacaataacagaaactcccatgggccctttccctagcctccatttccttctctagatagatatggtcaattctgttactctcccatctcaagcgccagtaattgagagtcactgtccagtcttctggctggacatcaggaaaatcaagtgacacaccgccaaccccagtctcattcatactagacaccctgaaggaacccaagcctgaaactgcagtcctgccaccacaactcttgcaaagaaatgagtcactccattggaaacagaaacctctccctccctgacatccaaagtttattcttcagagctcttgaagtaaatatgagctatgactaagacggtaagcactgttctgtgctcagccttgtgactgcaccactgggttctgggctggaactctgcgagtcagtcagctgttacttcatctttatccatctttatgcctaactctaaagtcacctcctcttttctatacaaacatgaagttttagtccaacagacttttgtgtcctacaggtctacatctaaggactcgggagggagaaaaaaacaattattgccttaacaacaggctgtggattctgcaaaacttgctatatgctaagttaaacataccttagcttttgttgaaatctagagagtgactttctcagggtttgatttttttcaagacagggtcacatagccttgactgtcctggaactaagtagacaaagctaaccttgaacttcgagagatctgccccactctgccttctgagtactgtgatcaaaggggtggtcccattgtaccaggttccaagtattttcttgaaacgtatgacactcaggttttggcaagaacttggttttatgttcttgacatttttgtcctatcattttgctttcttctacataagagttgtttgtttgtttgtttttcttaaatcttaggcaaaactctgtatgtctctcaattcttattgggctcatcttgcatgaggtaggacttaaaaatgtgactttgaggccactctgatctacatagtaagctccaggccaggcaatgttgtattttataaaaatagagaaaccagggatatgtttgatagaggccaggtataatgtgagataagggggtgtctctgtgggcccatgctgaggcatcccttccccctgagagaccagccatagatggatgtagtgtatagaatagggtttattcagggcatggggaggggagttggaaggcagagaaagaggggggggcaggttatgaccatgtggagagggaggggcaaggggtgagaggtcagagcaagagcaagagatcgaggagggggcaaagaagcgccttttttagtgagttagacacacctggctattgccaggtaactgtgggacatagcctagatgaaatgccaacaggcaaaactacatagagagatcctgtctcaaacacggacacacaccaaatgtagcaagttcccaattatgccaatacataaaagtgggatggggacaggtgtctccgtggctgaggtcccttgctcttgtagaggatctcggtttggttcccagcactcacatcagacagcttaccacctactaactcaattcccaggagtgcagacaatccttagacatctgcacacacccggaacacatacaaacaggtacacacacatataaaaaattaaaagatggttttaaaacaattcttcaaaaagaccaaaatccctttttaatatttaaatttttttcatatgacatacttgatcaggtcccctcctctccaaatcctctcagatcctccccataaatccctttgaagagtttgcccatgatcccagtgttaggggaatgggtgatgtcactagtacagacgctcaccagggaggaatatttggtggggtgatttatttaatctacttagaacccttggagtttcagccactctggcaggtggagaggactgaaagtgtgtctaattggtttccgtaataagcgctttgattgacctgcagttgcggtgccatgcatgtaccaggccgatacccacaagactccggctacttgaggtacattgaatttttccaaagtggctttgaagaactacacctgcaatccttcatttccttttccttctttacacaggctctcgtgcattccaagctggcctcaggttggttacctacccaaaatggccttgaaatttcgatcctcttgatgccacctattgagtctgcgtcatcacactgggctctaggtgctggcgatggcacccagggctttcttcagactagacacatactaacaactaaactacttcttcagccccaagaactacaattttcaaaggcggtggtgtgcacattacatgaataggcagatctcaacgtaaagtgccaaataaaaggcgactcccttctaattccgtggtttcttttatgtgctgggggtggggaagctgtctgtgcatgcaaatcaagaagctgggggcagcccggctcacgcatcttccaggccgtgtatgaccagtccttgctcactacactgccaattccctgtggactcaggaagtggctgttgttgtctagcaccgtcttccagggctaaagggaggctggaaccccaaacccgaaggactcggggtcggagacagagactgcgccgagcacgcaggtacgcagccaggaagctagcgctcccagccacgctctgcctcccgtcgtccgccgttcccccccacctcccccacgagcgccctgtcgcgcccctgcgcgcccgcccggggacccacttggcgggcgcgcgcgggggcggnnnnnnnnnnnnnnnnnnnnnnnnnnnnnnnnnnnnnnnnnnnnnnnnnnnnnnnnnnnnnnnnnnnnnnnnnnnnnnnnnnnnnnnnnnnnnnnnnnnnnnnnnnnnnnnnnnnnnnnnnnnnnnnnnnnnnnnnnnnnnnnnnnnnnnnnnnnnnnnnnnnnnnnnnnnnnnnnnnnnnnnnnnnnnnnnnnnnnnnnnnnnnnnnnnnnnnnnnnnnnnnnnnnnnnnnnnnnnnnnnnnnnnnnnnnnnnnnnnnnntcctcccctcggcctactgtcaacttgtcttcaagcccggttcgaaagatgccggcactagtgagtggctgcggcgggcccgccctcccggcttctccgcccccgccgccgccgtggccgccattacggagtccccagtggtgagtgtgcagagctgaggccacgccggtcgccgctggtcgccgccgggtccccgcagccaggagcgcggcgtggtctctgcgcggtacctccgccgccgccctcagcagtcccgcgcccatctta

SEQ ID NO: 935 - DNA, 5638 bp, Mus musculus
tccaggattccacgaggaccggtgcagcagcctttggaggatcggctcttcccacctacggtctctgcagtctatagcacgaccccttatccctctggacagaatgcaggtccagccacattggtctatcctcaagcccctcagacaatgaactcacaacctcaggcccggtctccgtttttccagaggcctcaaatccagcctccccgagctgccatcccaaacagcagtccttccatccgtcccggtgtgcagacccccaccgccgtgtatcaggccaaccagcacatcatgatggttaaccatctgcccatgccgtaccccgtgacccaggggcatcagtactgcataccacagtaccgccacagcggccctccgtacgtggggcccccacagcagtatccagttcagccgcctgggccggggcctttttatcctggaccaggacctggggacttcgctaatgcttatggaacgcctttttacccaagtcagccagtgtatcagtcagcacctatcatagtgcctacgcagcagcagccccctccagccaagagagagaaaaaaactataagaattcgagatccaaatcagggaggtaaagacataacagaggagattatgtctggaggtggcagcagaaatcccactccacctataggaagacccgcatccactcccactcctcctcagcagctgcccagccaggtccctgagcacagccctgtggtatatgggactgtggagagcgctcatcttgctgccagcacccctgtcactgcagctagcgaccagaagcaagaagaaaagccaaaaccagatccagtgttccagtctccttcgacggtccttaggctcgtactcagtggggagaagaaagagcaagcaggccagatgcctgagactgctgcaggagagcccaccccagagcctcctcggacttcatcacccaccagccttcctccacttgcccggagttcacttccttcccccatgtccgctgcccttagcagccagccactgttcactgctgaggacaagtgtgaacttccttcctccaaagaagaagatgcacctcctgtccccagccccacgtcttgcacagcagcctcaggcccttcactaacagataacagtgatatatgcaagaaaccctgtagcgtagcgcctcatgatagtcagctaatttctagtactatcctaattaatgaaatgaatggagttggtgaaaaattatcagccaaggagaacactgtgggcatgctgagacaggaagtgctgccattgactctcgagttagagattctggaacatccacaggaagaattgaaagtggaatgtacgccgactcccattgccccgtccatgctgcctgccttctccccagctcctccgactccccccacttctcctccttgtcctccggttgtcctctctgccgccattgctcgttctcccgctgttgccactgaggtccagagagtcgccgacgagggagaaagcctgagaacttgccttagcaaggatgcaaaggagatgcaggacaaagcagagtcagaatcagatgggcaagcagaagagactgcggatccccagagcctacattcaggaaggagccccgccccagtgcaaacagctaccactgcgccaaagtcctggaagaaaacaaaagagcagacccgaaccccagatgaagtgttagaagcagaggcagagcctaaagccgaagaagagcttgcagttgacagtgtccttgagcctgagcaagagaagatgagccaagggtttccgtctgagagagacccctctgccctgaagagagggaaagctgaggaaggaaacggagaagaggctgagcctgtgcgcaatggcgctgagagtgcttctgagggggaagggggagatggcaactcaggctctgccgacagctctgctgatgggctcaccttcccgtttaaagcagagtcctggaagcctgcagatacagaaggcaagaagcagtatgaccgggagttcctactggacatccagtttatgcccgcctgtatccaaaaaccagaaggcctgcctcccatcagcgacgtggtccttgacaagatcaaccagcccagattgtcaatgcggaccctggatcctcgcattttgcctcgaggacctgacttcaccccagcctttgcagattttccaaggcaaacgcctggtggaagaggtgtgcctctgttgaatgttggacctcggaggtctcaacctggccagagaagggagcccagaaagataatcactgtctccgtaaaagaagatgtgcacttgagaaaggcagagaatgcctggaagccgagccagaaacgggacagccacgccgatgaccccgaaagcattaaaactcaggaacttttcagaaaagttcgaagtatcttgaataaactgacaccacagatgttcaaccagctgatgaagcaagtgtcggctcttacggtggacacggaggagcggctaaaaggggtcatcgaccttgtctttgagaaggctatcgatgagcccagcttctctgtggcgtacgcaaacatgtgtcggtgcctagtaacgctgaaggtgcccatggcagacaagcctggcaacacagtgaatttccggaagctgctgcttaaccgctgccagaaggagttcgagaaagacaaagcagatgatgacgtctttgagaagaagcagaaagaactggaagctgccagcgctccagaggagaggacaaggcttcacgacgaactggaagaagccaaggacaaagcccggcggagatccatcggcaacatcaagttcattggagaactctttaaactgaaaatgctgacggaggccatcatgcatgactgtgtggtgaagctcctgaagaaccacgatgaagagtccctggagtgcctgtgtcgcctgctcaccaccatcggcaaagacctggactttgagaaagcaaagccacgcatggaccagtactttaaccagatggagaaaatcgtcaaagaaagaaaaacttcctccaggattcggttcatgcttcaggatgtaatcgacctcagactgtgtaattgggtgtcccgaagagcagatcaggggccaaaaactatcgagcagattcacaaagaggccaaaatagaagaacaagaggagcagaggaaagtccagcagctgatgaccaaggagaagaggagaccaggcgtccaaagagtggatgaaggtggatggaatactgtacaaggggccaagaacagtcgtgtactggacccctccaaatttttgaaaattactaaacccaccattgatgagaagattcagctggttcctaaggcacagctgggcagctggggcaaaggcagcagcgggggagcaaaggcaagtgagtccgcaccttcagggtccccgtcggccacacccttagagtttgattcccgaagggcgttaaccagtcgtgggagcatgggcagggagaagagcgacaagccaattccagctggaacagcccgtcccaacacgttcctgaggggcagcagcaaagacctgctggacaaccagtcccaggaagagcagcgcagagagatgttggagaccgtgaaacagctgacaggaggcctggatgctgagcgggccagcactgaggccgaccgaagcaaaacgagggagctagcaaaatcggaaatgtgtgcagtgccagcccctgacaagcctgcactgtcagaagaggaagtggagaggaagtccaagtctatcattgacgaattcttacacatcaatgactttaaggaggccacgcagtgcatagaggagctgagcgcccagggcccactgcatgtgttcgtgaaggtgggtgtggagttcaccctggaacggagccagatcaccagggaccacatgggccacttactgtatcagctggtgcagtcagaaaaactcagcaagcaggactttttcaaaggtttttctgaaaccttggagttggcagatgacatggccattgatattccccatatttggttgtacctggctgaactggtcacccccatgttaaaagaaggggggatttccatgagagaacttattgtggaattcagcaagccattacttcctgttggcagagctggggtcctgctttctgaaatcctacaccttctatgcagacaaatgaagttggacttcacggaatccgaagggccctgctcctctgaggcactgtcaaagaaggagctgtctgccgaggagctgtctcagcgcctggaaaagctcatcatggaggagaaagcggatgacgagcggatctttgactgggtggaggctaatctcgacgaaagccagatgagttcgcctacattccttagagctttaatgacagccgtttgcaaagcagctatcatagctgactgttctaccttcagagtggacactgctgtgatcaagcagagagtgccgatcttactcaagtacctagactcagacacggagaaggaactacaagcactttatgcactacaagcatccatagtaaaacttgaccaacctgccaacttgctccggatgttttttgattgcctgtatgacgaggaggtgatatcagaggatgccttctacaaatgggagagcagcaaggaccccgctgagcaagctgggaagggcgtggccctcaagtctgtcacggcctttttcacgtggcttcgggaagcggaagaggagtccgaggataactaatacttcaaatacacaaacgaaacaaaagaaacaatttaagtatttttttaaaaagtttcacgtcttcgccaatcacagtgcagcaaggccaactctcgcagaaaccccacgtgtgcgcgagtgggagaggggacaggaatcaggtgatcatggaggataaaggtcctggaacaaggaaacagcaaacccgagggcgggcgctccaaaaccaaaatacatgtactatttatagaaaatattttctgttttaatcttttctttttaaacgaggactcatactttaaaaaaaaaaaaaaaaaaaaaacacatttagcaaaaaaaaaaaaaagaaaaaagaaaaagaaaaaaaaaaaacagttgaactttaatttattttaaggactgcaaatgccagtgtaatttttttaatttgcagtttctgtaaacaacttgtataatagaaaagcagagaaataaatttcccttcccttcagatgcaccgcacatttgtgttaaggcatagctgttagtcccgatttgagaaggtttggggtgaacgaggtaagaaagatcttttttcccctccccccggcccttttcttgctccactcccagccctatcttcagatctttctgcctctcagcttgcttcagaaaatttaaaaatcacactagtaatcaaaacatacataaccttggaacagaaggaagtactgtggaccagaaaaatccaagaattgttcaaaaaaagtgctaccctggaaaatacccttaataccgttgaaatcgttagagtaactttaaggcttgtaaatacatagaacaaatatttaaaaacataaaaaaggaattgactcaatactatttcttttcactttcaaaatataaggaacaaaataaagacgagcattgcaagtttaaaataaag

SEQ ID NO: 936 - protein, 1570 aa, Mus musculus
SRIPRGPVQQPLEDRLFPPTVSAVYSTTPYPSGQNAGPATLVYPQAPQTMNSQPQARSPFFQRPQIQPPRAAIPNSSPSIRPGVQTPTAVYQANQHIMMVNHLPMPYPVTQGHQYCIPQYRHSGPPYVGPPQQYPVQPPGPGPFYPGPGPGDFANAYGTPFYPSQPVYQSAPIIVPTQQQPPPAKREKKTIRIRDPNQGGKDITEEIMSGGGSRNPTPPIGRPASTPTPPQQLPSQVPEHSPVVYGTVESAHLAASTPVTAASDQKQEEKPKPDPVFQSPSTVLRLVLSGEKKEQAGQMPETAAGEPTPEPPRTSSPTSLPPLARSSLPSPMSAALSSQPLFTAEDKCELPSSKEEDAPPVPSPTSCTAASGPSLTDNSDICKKPCSVAPHDSQLISSTILINEMNGVGEKLSAKENTVGMLRQEVLPLTLELEIHPQEELKVECTPTPIAPSMLPAFSPAPPTPPTSPPCPPVVLSAAIARSPAVATEVQRVADEGESLRTCLSKDAKEMQDKAESESDGQAEETADPQSLHSGRSPAPVQTATTAPKSWKKTKEQTRTPDEVLEAEAEPKAEEELAVDSVLEPEQEKMSQGFPSDPSALKRGKAEEGNGEEAEPVRNGAESASEGEGGDGNSGSADSSADGLTFPFKAESWKPADTEGKKQYDREFLLDIQFMPACIQKPEGLPPISDVVLDKINQPRLSMRTLDPRILPRGPDFTPAFADFPRQTPGGRGVPLLNVGPRRSQPGQRREPRKIITVSVKEDVHLRKAENAWKPSQKRDSHADDPESIKTQELFRKVRSILNKLTPQMFNQLMKQVSALTVDTEERLKGVIDLVFEKAIDEPSFSVAYANMCRCLVTLKVPMADKPGNTVNFRKLLLNRCQKEFEKDKADDDVFEKKQKELEAASAPEERTRLHDELEEAKDKARRRSIGNIKFIGELFKLKMLTEAIMHDCVVKLLKNHDEESLECLCRLLTTIGKDLDFEKAKPRMDQYFNQMEKIVKERKTSSRIRFMLQDVIDLRLCNWVSRRADQGPKTIEQIHKEAKIEEQEEQRKVQQLMTKEKRRPGVQRVDEGGWNTVQGAKNSRVLDPSKFLKITKPTIDEKIQLVPKAQLGSWGKGSSGGAKASESAPSGSPSATPLEFDSRRALTSRGSMGREKSDKPIPAGTARPNTFLRGSSKDLLDNQSQEEQRREMLETVKQLTGGLDAERASTEADRSKTRELAKSEMCAVPAPDKPALSEEEVERKSKSIIDEFLHINDFKEATQCIEELSAQGPLHVFVKVGVEFTLERSQITRDHMGHLLYQLVQSEKLSKQDFFKGFSETLELADDMAIDIPHIWLYLAELVTPMLKEGGISMRELIVEFSKPLLPVGRAGVLLSEILHLLCRQMKLDFTESEGPCSSEALSKKELSAEELSQRLEKLIMEEKADDERIFDWVEANLDESQMSSPTFLRALMTAVCKAAIIADCSTFRVDTAVIKQRVPILLKYLDSDTEKELQALYALQASIVKLDQPANLLRMFFDCLYDEEVISEDAFYKWESSKDPAEQAGKGVKSVTAFFTWLREAEEESEDN

SEQ ID NO: 937 - DNA, 390183 bp, Homo sapiens
  misc_feature (1)...(390183): n = A,T,C or G
aggtgtgagctacagcaggatacctggctgatcccaccttttttttttttttttttttttttgagagacagggtcccgttctgtcacccaggctggagtgcaggggcacaatcatggctcactgcagcctcgacctcctgggctacagtgatcctcctacctcagtatcccgagtagctgggaccacaggggcgcaccaccactgcctggctaatttttgtatttttagtagagactgggttttgccatgttgcccatgctggcctcaaacacctgagctcaagtgattcacccaccttggcctcccaaagtgttaggattacagaagtgagccactgcgctcagtaggatcctacttccgaatgagaggataggatcacatcgtgagagacaccttagagaggtcgttccgtcttggccctgctgctcacttgcttgaggaaatccttttccaactctgtgctctgtgcctaaaccaggagcctgagaaaggtaatccttgagggtgtttccagcccgaccagtctctgtaatacttgttagaaattgtgctaaaacacacatagcaacacttaccatcttaagcattctatgataatactttttgctctcttttgcatcctaatgaacctgaactatctaaggccactgtggctggaagggctgtggtcaactctaggaattgctgacagctgtaagaatcacacgtgctgtgggcaaagaggtaggacagcttggctccagaagtgagagtgatgttaaatcaaagaagctgaaacttcaccctgaggggaatagggaaggaagtaagggttgctgagctgcctattgtgccctaggccctgttgacagtctctgcagacaagttcctttacttcttgttctaatctgttagaggctgacttaccttcatttggcaaatggtccacagaagttaggaaacttacttagggtggtacagcttggtctataaggttagaatctggatctgtcttatagccataaaaggaaccaccaccctcacacaccaccatatatccctgggccctaaggcatttggaagggccaactggctcagctctatgcagatgagcatttgtggcccatcatgaacgtacttgcatacggggaatggagctaaatctttacttttcctactggggtttctctccttcctccatgtctatttcaggtgggagccccacagtctcttcttcctttatatttattttttaaagacagggtcttgtcttgtagcccaggctggaatgtagtggtgcaaccatagcttactacagccttgaactcctgagctcaagagatcctcttgcctcagcctcccaaatagctgggattattggtgtgtaccaccatgtttggctaattatttattttattatttacttatttacttatttttgagacagggtcttgttctgttgctcaggctggagtgcagtggtgccatcatagctcactgcagcctcaaactcgtaggctcaagtgatcttcctgcctcagccttcccaatagatgggactacagacacgtggcatcatactcagctaatttgtaaactctttttgtagagagagcaactcactaggatgcccaggctggtcttgaactcctggtttcaagtgatcctaccccctaggcctcccaaagcattgagattacaggtgtggaccacagtgcccagcttcctccccgccacctccttttttttctcctcttcctcctcctttttcttctcctccttcatcttctttgttttctcctcctcctgcttatcttcttcctccttttcctccttctcctccttccttttttttttttttagacggagtctcgctctgttgccaggctggggtgtagtggcgcaatctcagctcaccacaacctctgcctcccaggttcaagcgattctcctgcctcagcctcctgagaagctgggactacaggcatgtgccaccacacccagctaatttttgtatttttagtagagacggggtttcaccttgttggccaggatggtctcaacatcttgacctcgtgatccatccaccttggcctcccaaatcccaaagtgctgggattacaggtgtgagccaccgcacccggccgtccttcctttttaatctctttggcctcccatctctatgccttaattaccttgggtctagatgtattctcagcaggccttggtggacgtttgcgtatttctgtgcagagcatctaatgatactcaagtctctctgggctaatacaaatggcttctcttggcataacatggcttgcttttaaaggccagtccctccaggaggaaaatgaaagggtcagagaactccaacttgccacaacattttggaaagttttttatttttatttttatttttttggggggggcgggtgatgaactttacccttagggactggaaagtttagattaccaagtcactttgttcaaaaagactttgttgccaggacacagcaaaccaaggctcatggacttaattaagaaactaagtagtccccctgggtccaattctcagctcactgaggcaaacagagccatgatcccacatggtaacaagcaacacaccatcacccagctatgaggaaatgtacaagcttataagctgagtcttcatctgtcatctagctctttgggaatgttggtctttgacagaggctgcactgggctctgggaacagtagatggctggtcaaagacacaatgcccgtctcgtgggctagcagggcctgctctaggatactcttgcttttctctctccctgtgcagtgagactcagtctggcctcttgtgtgactcagaacttctccagggtaacaccaaatctttaggcaattcacgattattcagtcattcagcaaatttcacatcctatttattgagtactagatgtcagagatattttaaatgactaagtaatctctggccgggcacggtggctcatgactgtaatcctagcactttgggaggccgaggcggacagatcacctgaggttgggagtttgagaccagcctgaccagcatggaaaaaccccgtcgcttctgaaaatacaaaattagctgggcgtggtggtgtatgcctgtaatcccagctacttggaaggctgaggcaggaggatcacttgaacctgggaggtggaggttgcggtgagccagagatcgtgccattgcactccagcctgggcaactagagcgaaactatgtctcaaaaaaaaaaaaaaaaaaaaaaacaaaaaggctaagtaatctccctgcataaatgaaaaagaaatagctaaaacttatccaagaattactatgagccagggactgagctaagggttttgcatttgttttattaattaattaattaatttcttgagatggagtctagctctgttgcccaggctggagtgcagtggtgtaatctcggttcactgcaacctccacctcctgggttcaagcgattctcctgcctcagcctccaaagtagctgagattactggcaccgccaccacgctcagctaatttttttatttttagtagagatgggatttcactgtgttggccaggctggtcgcaaattcccgacctcatgatctgccggcctcggcctcccagagtgctaggattacaagcgtgagccactgcgcctggccacatttgttttattttttatgataactctaggaggtagaacctctttattttacagataagaaaaccaaggcttggagaaattaagtgcgttctccaagatcatacagctaatcaatggtagggctaagaatcaaactcaggtcatttgctttcagtggccgcactcgtggagagtgccctgagagttttaagcatccactgccaaggggatctagaggaagggtccctagttcagcttggggagtgaaaaaaggctgccttgaggaggtgatgcttgagccaaaccttgaatcaggaattagccaattggctaaggggagtgaggacggtttagggatacagggagcagcagcaggctgcacatgggccccagggcaaggagaatggtttcatttccaatagaccaaggtggctgcagctctgaatttgaggtggagtgtggcagattggaagcagagcccagactctgaaggactttagatttagattggatcctgaaggtgatggtaacaggaaagttaacaaaatcagcttttcttgttgacagtacctctggccatagtgggtaggttgctatgctgaaggcaacctggcaaatcagacctagagtcagatgccttgggtttgaatccctgtacatttacttaaaagttatgagaattttcacatctttgaatctcagtttttaaatttgtagaagcagggagtggtggctcacacttgtaattccagcactttgggaggccgaggtgggcagattatacttgagcccaggagtttgagaccagcctggattacatggtgagacccttgtctctacaagaaaatacaaaagttagccgggcatggtggtgcgaacctgtagtcctaactactcaggaggctgaagtgggagaataacctgagcctggggaagtcgaggctgcactgaaccgtgattgagccactgcactccagcctgagatcctgtctcaaaaataaataaataggccaggcacggtggctcatgcctgtaatcccagcactgtgggaggccgaggctggtggatcacttgaggtcaggagtttgggaccagcctggccaatatggtgaaaccctacttcttctaaaaatacaaaaaaatcagctgggcgtggtggtgcacacgataatcccagctactcgggaggctgaggtgggagaatcgctagaacccaggaggtggaggttgcagtgagctgagatcgtgccactgcactccagcctgggagacaatgagactctgtctcaaaacaacaacaatgcatatatatatatataacaatatatattatataatatataacatatatattacatataatgtatatattatatgtaatatattacatatattacgtaatatatgttatatattatatgtaatatataacatatattacgtaatatatgtaatatattatgtaatatatattatatataatatatattatatataatatatgtaatatattacgtaatatatattatatataatatatgtaatatattacgtaatatatattatatattatgtataatatattatatatattatacataatatatatattatatattatatattatatattatgtataatatataatatataatatattatatattacatataatatattatatgtaatatataacatatattacataatatatgtaatatattatgtaatatatattatatataatatataatatatattatataatatattacataatatattacatatattatatattatataatatacaatatatattatatatattatatattatataatatacaatatatattatatatattatatattatataatatacaatatatattatatatattatatatattatatattatatctgctgcttgatatatataatatataatatatattatatataatatattaaatatataattaattaattaattaataaattatataatatatatatatatgcaagtgnnnnnnnnnnnnnnnnnnnnagcactgtgggaggccgaggctggtggatcacttgaggtcaggagtttgggaccagcctggccaatatggtgaaaccctacttcttctaaaaatacgaaaaaatcagctgggcgtggtggtgcacacgataatcccagctactcgggaggctgaggtgggagaatcgctagaacccaggaggtggaggttgcagtgagctgagatcgtgccactgcactccagcctgggagacaatgagactctgtctcaaaacaacaacaatcatatatatatatataaaatatatattatataatatataacatatatattacatataatgtatatattatatgtaatatattacatatattacgtaatatatgttatatattatatgtaatatataacatatattacgtaatatatgtaatatattatgtaatatatattatatataatatatattatatataatatataatatatattatataatatattacataatatattacatatattatatattatataatatacaatatatattatatatattatatattatataatatacaatatatattatatatattatatattatataatatacaatatatattatatatattatatattatataatatacaatatatattatatatattatatatattatatattatatctgctgcttgatatatataatatataatatatattatatataatatattaaatatataattaattaattaattaataaattatataatatatatatatatgcaagtgaggtctagacttgagcaaggccattctttgggctgaaagaacagagctctacctttttgactttgttccctacaaacttcctccattgattgcctgtggccagaatcttatcagggacttttacattattttgcccaaggtctatccattttaaaacagataagtttcataaagtgcttagctaagactggcacacagtaattgtctgatgcttgtagctattattaagttagaaaatgaagctagctcagaaaagaataacaattaggcaattatcggcctgttatcaccctagtgtaaatgagaagtcaaataatttccttggaacaggttttgattgggataaggatgcctgagattccagaaaatgaaaggagaatctggggaactgaaggaccactagggaattcttcctggagccaattatatgtggagaggagcagaaaatcccatcctaaataatcaggtgttacaggccgggcatggtggctcacgcctgtaatcccagcactttgggaggccaaggcgggcggatcacgaggtcaggagatcgaggccatcctggccaacacagtgaaaccccatctctaccaaaaatacaaaaagagaaaaaaaatcagccgggcacggtggcaggtgcctgtagtcccagctacttgggagactgaggcaggagaatggcgtgaacccaggaggcagaacttgcagcgagccaagattgcgccactgcactccagcctgggcgacagaacgagactgtctcaaaaaaaaaaataaataaataaaaaaatcaggtgttacaaatccagacagtttaagatgccacagtatgaagtagctgctgtcttccagtctggagatggggatgaggcatccttttcaatgtcagaaactgtggagctctagctagaaagacgccgtaggggggttgtggtatcactctctttcagatgctcttttatcctagaaggagcatttggggctcccagggattgtcacgaattaagcatccactatgtgtagagctttatatgaattaaaaacaacaataggccaggcgcggtggctcacgcctgtaatcccagcactttgggaggccgaggcaggcagatcacctgaggttgggagtttgagaccagactgaccaacatggagaatcaccgtctctactaaaagtacaaaattagccaggcgtggtagcgcatgcctctaatcccagctactcgggaggctgaggcaagagaatcgcttgaacatgggaggcggaggtttccgtgagccgagatcgtgccattgcactccagcctgggcaacaagagcgaaactccgtctcaaaaaacagcaacaacaaaatagtaaggcagtgtgtgaagcaggatagcaggagtcagaactagactctaatcttagctctgccagccacactgtcggtgcgacctcggggaagtcttttgtgcgttttgagcctcaattttctcagcttttctgtggtttgatggtattgagcctccccagtctcagtttattcatttgtaaaatggatactacctatttcacaggactgcttgagataatgaagggtacagcgcttagtgccatgtctggtaaatattatattaaaacttgattgctccatgacgcctgccattttttttttttttttgagacgaagcctcactctgtcgcgcccaggctagtgtgcaatggcactctctcagctcactgcaacctccgcctcctgggttcaagtgattctcccgcctcagcctcccgagtagctggtgcctgccaccacgcctggctaatttttgtatttttagtagagacgaggtttcatcatgttggcaaggctggtcttgaactcctgacctcaagtgatccaccggccttggcctcccaaagtgctgggattacaggcgtgagccaccgcgcccggccgatgcctgccattctttcccactcaatgccactgtgcttaggacaaggcacctgctaaggagtggggtgtgcggggttgggggtgggagtgatcttggcaggtctagctgggaagaaaatccttatcaacaaatgtcacccagcataggacattggggagctgatcactggctgctggtcaaagggcgctccagtcctggggaaggcctaggtttgaatccatccacagagctcagttaaggctgctgattagatatggcggctcaggtcatgtccccagccaatatgggaggcggcaaggttcatccagatgaaggtggcatttagatttaggctctgtcctttcccgatagggtgaccttgggctagtcacttttcctctgtgtcctctggaaatggggctcctcattcacctctcagagcgtctgaggaagtgtcgacacaatgggtgtgaaatgcgtgggttacaggccggcgggtggcattggttacgcgaagtccccgcggggggtccctatccaacgggttccattccggttaagcggttccttctccaggggtttttcgcctcgccgctgcctctccgcccctgcgagcggggctcagcgaacagccgactccggggccattaccattgttcttcgaggctgggccgcaggggaggactctcgcaagccagacctcgcctttggtctttccctccgccccgcacccgcgccgctgtaagccagcgaagcctccctcgccgatctttgccgaggaagcgagttagcccctgagccctcccgaacggcggccgaggacgcacccgagcgtctccgaagaatcccgacccctagcagtctccggaaagagccgaagaggcttcccaccctcggtttcccgagccattccgaaaaagtccgaagttttccgagcagccgtcctgccggactgctggaggcggccacagcgccatgttggatgctctgctcgttgagtgaagaaaatccaccggcatcgcctgagccccgctaccgagaagggcgccgcttcctccggggagggggataaagatcccccgccgccggcccatgaggatattgccgtgaaaggtccggtctctccgcctcctgcccccgccgggtccggccccccccctggggtcgcgttgtcacggagaccggcagccggtggtgctggcccgcggggcggctgctgctgccggcggcggcggcggcggaggcggcggcggcggcggcggcggcgtcgggcgtgtgtgaccggccccggccccctcctcctcctccccccaggctccccccagccccccgctcccgccgcctccccgggtctgcccccatcccgcccccccgctgcccccggcccctgcaccccggcgcgcccggtcccgctctgggggggttggtggcttcgctttgccatgagtttaccgcagaaaccggctctgaaatcaggcacagcgactgcagcaggaaccggacccggcaccggagcggcggcggcggcggcagcagcggtaccgcctcctcacccggcggcggcagcagcggcggcggcggcggcggcggcggcggcggcggcagcggtcccccctcctcacccgaacatcagggccctccagactcaggcgccccaacagtatccttttcaccttcctgtcggcccttcggttctcgtcgtcgcagtccagggggaccccgcagcccaggggaccctcctgccggccgccacagcccagccaggaaagggacagcggctcaagcccctgcatcgggcttgggcggagcttttggggtgccccggcagcagcactgcggggggacccccagaccctctgcaatactgtgaaagctagccccacttggccatgcttctgcagccccttccttttagagcttggggtcccttctcccctcctcccctaaggtaccctccccccctttattgggcagaatttgcttggtgcctgggaccaaccctgcagggaaggcttttctctggttgttgtgaggattacaccctcctgctcttcacctcccctcggctccccctacagcgggacacagtgggcttccataattattattagtacataataaactttatcggtaaatttcttgtttgaaaccaatcagctcgtttccgaggtatgttggattttcagtctaaggtgaaaatgtacagaaagcagttcctctggataattttttttagtaatgggagagttgtgatgtggtttgtggtagagatctgaggaggaaatgtgacgccggacgcttccctgtctttgacctttttaaaggaagaggaagttcaccgacattacccatcacccacaaaagtctcacttcttggaagatttgtgttaggctgaatatttttaatgggctttaatttactcctcataggcctgatgtctagagagttaccagggcttctggaggaaagtctagtattgaatgtttctaatttcatgttatttgctcgattgtagaattttggagagctttgattgaaaagacttggtgatggggtattttagtcaaaaactagccggtgaaggtaaaacgttgaattcatgtattccacggagatttagaaaggtattgcgtacctgagaataacatttcatcatgcatcacctcctccctacacccactgtatttgtgtaaatcaataaataatgattggatgttagatgtgttgtgtttttatgtttgtgtcatcgtgcgtttgacttttagagattgtaggatgtttgagcaagtaagaagctaactgctgtgaggtccccagattatttcacagtctgtagtttgattcttgtctgtatagattactttgagaagggaaagcaatctcccttctagagtcatttcaggtcattgtttgttttctgccaagtgtcattttctctgttctttaaacctagttcgtgattttcaatccaggcaccgcggtgcagtgtaaagataaattccattccagtgtgacgtgtgtactgatttcataatgtttttatcctgcatgattctgttcaattaggaattgttcaccgatgagaaagtgtggtgataacttagcgttgcttatggaaaacctggttggttttgttcagtgtctctggggtgggggaagattggctggtttgcctacttaaaggcagagttcagtgttgaatcttttaaacctgtctttgcttactactttgtgagtttaaattcctttctaatttcattttttaccttgattgcctatactcggttaggacttttaagtttctgaattgtgctaccacgtaaattactcattacctgcatctttgagctgttttggcaattgaacagaaataaaaggaaacctgtagtaggtgtccttgatgtacagagtagtaaggaccacagtgctgaatgtgacactgtttggtgaattgggtggctttttgggatacagctgtgtttcaagtatgctttttctcagtgcatttcatagaaggacttataaaagctctgagttggttgcaacattcaagtagttacaaaagctgaaacttaattttcttttgaataaaaagcacttgttaaagagataaatttaagtgtaagttccagtgtagataattttaaaccaattttagtcatatggaacacttacttttgtgtggctttaagtttttactttgcctcatgccattgaagctaaaattaatcttcctcttgatgtgtttcacagctcttattgttttctctttgcttttacacactgaaaggttacaattgctaaaatagaaaattttattatataaacagtaaaggaagtataggttgtagatttcatcagacataccagtggtgaagtgttatcaactggtaatggggtattgattaaaaaaggattgaaatagagcagttctacttttctaccctgagggagtatgggaatttgtatttgacgcaagtggtcattgttcaataagtggataacatttaagcatcttggcaggagtgcatagctggagttagcactgttcatggcttgaatagatctccagaccctcaaagtatgtgggtatagttgtgtttgcattgaattaataagttcagacagttttatttatttatttttgagacagagtcttgctttgtcgcccaggctggagtgcagtggtgtaatctcggctcactgcaacctacgccggctggattccagccattctcatgcctcagcctcctgagtagctgggattacaggcgtgtgccaccaggtccaggtaattttttgtaaggcgtgatcagactgggtttcaccatgttgaccaggctggtctcgaactcctggcttcaggtgatccgcctgcctcagcctcccaaagtgctgggattacaggcattgagccaccgcacctggccctgatctggtgaaacctggtctctactaaaagtacaaaaattagctgggcgtggtggcgcctgcctgtaatttcagctactcaggaggccaaggcaggagaatcgcttgaacccacgaggcagaagttgcaatgagccgagactgcaccactgcgctccagcctgggttacagagtgagactccacctcaaaaaaaacaaaatcaaaggtcttctagaaaatgtttggaacccacgtcttttttttttttttttttttttttttttgagattgagtctcgctctgttgccaggctggagtatagtggcatgatcttggctcactgcaacctccgcctcttgggttcaaacgattcccctacctcagcctcctgagtagttgggactacaggtgtgcgccaccatgcctggctaattttttgtattttagtagagacggggtttcactgtgttggccaggatggtcttgatctcctgaccttgtgatccgcctgcttctacctcccaaagtgctgggattacaggcgtgagccactgcacccggccgagaaccacatcttaagtcaatggagaggattcctgtaatcccagcactttgggaggccgaggtgggcagatcatgagatcaggagatcgagaccatcctggctaacacggtgaaaccccgtctctactaaaaatacataaaattagccaggcgtggtggcaggcgcctgtagtcccagctacttggtaggctgaggcaggagaatggcgtgaacccgcgaggcggagattgcagtgagccgagatcgctctactgcactccaacctgggtgacagcgagactccatctcaataaataaataaataaataaataggattgccacattttgccatttatattgaggcttcaatagatgtggcaagtttatgaattcattaattcagcatccactgtgtgctgctacactcagtgctagatgtaggattgaagagctaaggtagaaatctttgccctcaaagaacttggtccttttgggtagaggtgggtaaacaaaacgtcatgaggcaagtacagtgataactgataactctgctgtgagagtagtctggggaaggaggaattaaggctttctaaaagaagttgacatctcagctaaattagaagaatgagtaagaattaacccaggtttacatagctttctcttctgccggcctgctttttccaattccattgctgctccatagaattttaataaatggatttcagtcacgtttcaggcttttttttttttttttttgctagaggaggtaccagagaaagtgacagtcaaacacaagctaaaaattcaaagtattttctgtatcataatctaaggaattagtgtatgagaaggagatacatacctgatctgatctgtggtgggtcttttcctggtctccttcccagtgcatctcgtaatatccttgcccttttaatactagactttggcttagaaacagtacttgctagtcttaaaatagaagtagatttaccttggtgtattgagaagtgtacctgatttggaggcaaaaaatctggttttgagtttggctctttcattgtagtagatatcttatcttagactaaccatgcaactgcttcaggcattggttatcccttctctgaaatgtagggtctagactcatttattcagtgaccttcttgaattataattgcttatgattgtcttttgagatttgtgttattcttgcaagtggagaggagggatttacagaaaccagttaatgttttctttgtctgatggtaagtgacatgttctgtggtggcttattgatattagaagatactaacatggggcagaggcagaggcaaagcagcagtttgctcatataagctacttctggtttttggcttgttaatgttagattcagccacagagacagaagcacctctctaacttcagtggtgaagactgtatagttagttgtgagatagtgggagaccataaaataaggttgccatggtcatttgctggcttgttctgggtgatgatacagttagttcattatgagatatgagggaaagtaagttctggaataaactcccgtggtgctgtggtgagacacaatctatttttacctaaggaataatactttgagctaatataataggaaagtaactagttcctgattattagccacgcatatgactttaagcaatggataaactgcagctgagacttacacggatgagatattgcaggatcccaagcgacttctgaattctcaaatggcttccagttctttggcttgctgccaaccaaaggaatttttcaatctcctgtagctcagctgaaatttgagaaagttaaactattttaagtgcatttgaaatttgttggtttttacgacttttttttttttaatttatttttttagacagggacttgctctgtcacccaggctggagtgtgatcttggctcactgcaacctctgcttcctgggttcaagtgattctcatgcctcagcctcccaagtagctgggattacaggtgtgtaccaccacacctagctaatttttgtatttttagtagagatggattttgccatgttggccaggctgctcttgaactcctgacttcaaatgatccatccaccttgacctccccaagtgctgggattacgggtgttagctactatgctctaccatgatctttattaactaataattgttttgtacttttttttgagacagagtctctgtcgcccaggctggagtgcagtggcgcagtctcggctcactgcatcctccacctcctgggttcaagtgattctcctgccttagcttcctgagtagctgggattacaggtgcgcgccatcacacccatctaatttttgtatgtggggtacaggtggggttttaccatgttggccaggctgttctcgaactcctgacctcaagtgatccacccatctcagcctcccaaagtgctgggattacaggcatgagccaccacacctggcctgttgtgtacttttttgagcccactgtgtgctgcctgactttataagacattgaattttgttaatagaatgtaaactccatgaaggcagagatttttgtttattttgttcactgtggaattgctagcacctagaatactgcttgacagacagtaggcagtctgtaaatttatttgtttgtttgtttgtttgtttatttatttatttatttatttatttttgagatggagtttcactcttgtcgccctggctggagtgctagtggcacaatctcagttcacttcaacctccgcctcccggattcaagtgattctcctgcctcagcctctagagtagctgggactacaggcgtgcaccaccacgcctggctaatttttgtatttttagtagaggcggggtttcaccatgttggtcaagatgttctcaatctcctgatcttgtgatccgcctgccttggcctcccaaagtgctgggattacaggcttgagccaccgtgcctggcctgtaaatatttattaaataaaaagtgtgttggactttgggaatcaatttgaagataagttttaggattaatatagatggcatcacaactcacttacagcattcaaagctgccctcaaattattttgcagggatgtataattgaattgaaaataattctgtaatttcctttcagatggaatagcattgacccagtttacaaagccatctgaagtgcctgagttgtatttgaagtacatattgatactgaggattagggttggtatgaaggccaaagaggaacaacatctgtagtcaaatattattattaaaaacttatgattataagagcaagacataattaaatgagaaatttggaaaaatatagaaaagtaaaaaatcactcataatcttattagtggagacaaccccttttattttattttattttatttatttatttttttggggggagagagtgttgccctgtttcccaggctggagtgcagtggcacaatcttgggtcactgcaacctctgcctcccgggttcaaacaattctgcctcagcctcccaagtagctgggattacaggtgcatgccattatacgcagctaatttttgtattttgggtagaggtggggtttcaccatgttggccaggctggtctcgaactcttgacttcaggtgatctgcccacctcggcctcccaaggtgctgggattacaggtgtgagccaccgcgccttgccacttttttaaagaggtggggtcttactctacctcccagggcatggtcatggctcactacagccttgacctcctgggctcaagcaatcctcccacctcagcctcccaaggagctcggaccacaggtgtgtgccaccacacctagctaatttttttgtagagatggggttttgccatgttacccaggctggtctcgaactcttgggctcaagccacctgctcaccttggcctcccaaagttctgggattacaggcatgtgtcccagtgtgtagctgtgataaccacttttaacattttggtgtatnnnnnnnnnnnnnnnnnnnnnnnnnnnnnnnnnnnnnnnnnnnnnnntacctagttttgtatcttgcttaatttgctacctaagtatctgccatgaaaagtactttttttggccaggtgtggtggttcatgcctgtaatcccagtactttgggaggctggggcaggaggatcacttgagtctaggaatttgagaccagcctgggcaacatagtgagaccccatctctaataaaaattaaaaaatagtttgccaggagtggcagtgcatgcctgtagtccttgctactcaggaggctgaggccggaggattgcttgagcccgggaggtcaaggctgtagtgagacctgattgtgtgattgcacaccagcctgggtgaaagggcaagactgtcccccaaaaataaaaagagatacttttttttttaaaaaaattgagacggagcctcgctctgtcacccaggctggagtgcagtggcacgatctcagctcactgcaaccttggcctcccgggtcaagcaattctcctgcctcagcctcctgagtagctgggattacaggtgccctccaccacgaccggctaattttttgtatttttagtagagacggggtttcaccatgttggccaggctggtctcaaactcctgacctcaagtgatctgcccacctcagcctcccaaagtgttgggattacaggcgtgagccaccacacccagccaagagatacttcttgaatagttttattctgtatctacttgaaatataagtgaactttttgtttatttggaatgcttttcttgggaatattttttcacctttggcttttagcttagaagttatgactgcacattacaaaggggaatgttcaaacctttatcagtaagtcaaacatcttttgagttattgttcctgtaatgttttgcattatttgcaagattaaaactcagtgtaacatcacaagtttttttcccatacaattatttacatttctttattatctctttaagttcatctttatatgttcaagtatactaagtttttaaaaaagcctgggagccagagtcctaatttttttttttctttgtgacggagtctcactctgttgcccaggctggattgcagtgttgtgatcttggctcattgcaacctccacctcccgggttcaagcggttcccctgcctcagcctcctgagtagctgggattacaggcacccggcaccacgcctggctaatttttgtatttttagttgaggcagggtttcaccatattggcctggctggtcttgaactcctgaccttggccttccaaagtactgggattacagacgtgagccactgcacctagtgtatttatatattggccaggctggtctcgaactcttcatctcaggtgatccatctgcctcagcttcccaaagtgctgggattacaggcgtgagccatcgcgtctggcatttagttggttttcaggaagtgttagtatcatgaggagtgattgaaggaaggaggaaaagaccacagggattcatgcgggatgagggaaagaggattgaagtgtgggaacaaacataattttggaataaggagagaaaattaagtgggaatagaaaatgaacacagccagttttaaaccagaatactatttttacattgagaatggaaaggactgaaccttgaaggttaaatgagatgattcctgaccttttttctaggtcctagtaattagtatgtaagaaatagaacttggtcggagaacttggccaggtgcagtgactcatggcctgtaatcccagcacttcaggagcccaaggtgggtggattgcttgagttcaggagtttgagaccatcctggatgacatgacaaaaccccgtctttacagaaaatacaaaaattagccaggcgcggttgcacgtgcctgtagtcccagctacttgggaggctaaggtgggaggattgcttgagcctaggaggttaaggctgcagtgagccatgattgcactgctgcactccagcctgggtgacagagtgagaccctgtctcaaaaaaaccccccaaaacaaacaaaaaaaacccttaattcatttatttattttatttatttatttttttgagacagtcttgctctgtcacccaagctggagtacagtggtgcgatctccatctcagctcactgcaacttctgcctcccaggttcaagcaattctcatgcctcagcctcccgagtagctggggattacaggtgcacgccaccacattggggcaatttttgtatttttagtagagatggggtttcaccataataggccaggctggcctcggactcctgaccttaagtgatctgcccctctcagcctctaaaagtgttgggattacaggcgtgagccactgcgcccagcttattcattttttcgagatggggtctggctgtgtctttcaggctggagtgtagtggcataattatggctcacagtagccttgacctgctgggctcaagcagtcctcctgcctcagcctcttgtgtaactgggaccacagacacactccgctatgcctggctaattttttaatttttttttttttttagagatctcagtttgttgcccaggctgatctcaaactcctgggctcaagggatcctctcgctttggcctaccaaagtgccgggattacaggtatgagccattgagcctggcatggaagtatgaatttttaaaaggaaaaaaaagagtttaagactatagtcagggtttagataggcagaggtgggtggattatgatgagtgggtgatcaatatgaacaaagatttgggcctgaagcaagtgtagtgtatgctgtgttctaaggatttggatctgtgtgcttggaatggaggattctcatggtagaatattcaagataatggatccagattctagagcattttgaataaataagaggaagttagacttcagctgtgtgaaaccattacttttttaaaaaacagctttattgagatgtaatccacataccgtatgagtcacccatttagagtgtataattcagtggttttgggtatattcaaaaccagttgagaattgtacaactactaccataattttagaatatttttgtcactccccaaaggaacctgtttgactccccatgactccccattttcccccagttctccctgccctaggcaagtccaagtctattttctgcctctatatatctgcctattttgaactttttacgtaaatggactaatgtattttttgtgtgtgatttgtttcagcataatgttttcagggttcgtctgtgttgtaaccatgtattagcacttcatttttaaaattattgagtaatattccatgtaccatggacatttgggttgtttcaactttttggcctttggataatgaatagccaaaaggttggataaaatttctggctctgaatgatgttgctgtgaccgttcatggatgtttttatatagatgttatgttgtaatttctcttgagtatataccttggggtatagttgctgggttatatgaggtaactccatgtttaacatttggaggagctgccaaaatgttttccaaagtggttacaccattttatgttcctgccaacaatgtatgaggatttcagtttttctgcatccttgccaacacctgtcattatttgtctttttgattataggccatcctattgggtgtaaagtggtatcctcattgtggttttgatttgcgtttcccctgatggctaatggagttgagcatgtttttgtgtgtatttggccatgtttgtgtgcatttggccatttgtcagttacggagaattatactatatatataccattgcccagttgttaattgggtcatnnnnnnnnnnnnnnnnnnnnnnnnnnnnntgcagcctcgaactcctgagctcaaggagccctcccacttaagcttcccaagtaactgggactaactgcatgtgtgcgccactacacccagctactttttgtattttttgtagagacgggatttcaccatgttgcccaggctggtctccaactcctgggctcaagtgatctgcctacctttgccttccaaaatgcgggattataggtgcgagccaccactcctgcctagttttttattttcggtagagacagagtctcactgtgttgcccactcgtgtctcaaactcctgagctcaagtgattctcctgccttggcttcccaaagtgttggaattacagacatcagccaccccgcccagccttgtgcgttaaggttatataatccattaagtgcttgagatttagtgaggtgtgctatttataaaataaggcctattggataaacgaactttgaccatttctatccttttttatgcccggaaaacaagtgttgtctgcttttattattaagataaattactattaggcagtggtagttttgtaaaaaatagagtataagcatttgactgttttgctgtcctgtgaataattgaaattatgagttacaaattcttaggtttttggattttgcatagtgttagttctgtcaggttaaaattggttgttgattgatatgaggttatactcccaggctattctaatgtatatgttattataaagaaacaaaattggagctgggcacagtggctcacacttgtaatcccagcacttcgggaggctgaggcgggcagatcacctaaggtcaggagtacgagaccagcctggccgacatggagaaaccctgtctctactaaaaaaatagaaaaattagccaggtgtggtggcacgtgcttgtaatcccagctacttgggaggctgaggcaggagaatcgcttgaactcaggtggcggaggctacggtgagctgagatcacgccactgtactccagcctgggctacagagccagaccctgtctcaaaaaaacaaaacaaaacaaacaaaaaacaaaattgggaaatactgcttaatctcttgtttagcaggattctttttgctatttaggaaaagaccacattaaagaagaggttattttgttacctttaggtgtaataaaaacagtttatttgttttggataaagactttccacaaaaaaactcttcagttgcttaacattgggaagtgggaatgagtggagttgctgattttgtaagattgtatctgctttaagttttaaattattatgcatgtctccagcttagctcttactcaatattcaaaggaagtgggtcttaattagtccatgtataattttaatggcatcaagtacctaattaataattgttgaatctttgaggctaatgtagtcagctgatactccctgtgttacattgttgatctttttcagaaatattagagtttgaaagtagtccaacttcctggaataaatgctgtttcaaaagcagactacagagcacttgaccttagcttattaccttttatattgtgtgactgagtgagtgtatttaaatgtggtacattttaggtaaggcaatgaaagctgagtgtggctctggaatgtcattgatttcattcttgatcttcattagaaaaatcatagttaaaggatccaaacataagtatgcattagcttatttttcctttacacatagtagacagtaaatttaaaaagaagtgtctttgaagggtgccaccatgagccagtgatttttctaagctggaaaggagtttggggatttttctggttcagctttctgccccctctcctacctttgttctagaggctgaggggaggttagggcaacttgcctaaccataaagttcatgccaactcaaatttatttgaggtctttaacaacactgaccagtgacctactaatagatcctgtttctcctgtaatggtcctggtttggatagtaaattatatggatacccccacctggtaaccattacatagcttagacaattaggaatctttttatttatttatttttttttggagatggagtctcgctctgtcccccaggctggagtgcaatggcaccatcttggctcactgcaacctctgcctcccaggttcaagcaattctcctgtccttcctcagcctacagagtagctggcattacaggtgtgcaccaccacactcagctaagtttttgtatttttagtaaagacagggtttcggcatgttggccaggctggtcttgaactcctcaagtgatccacccgcctcggcctcccaaagtgctgggattacaggtgtgagccactgtgtcccaccttttttttttttttttaagatgatgtcttgctctgttgcccaggctggagtgctgtggtgtgatctcagttcactgcaacgtccacctcctgggttcaaatgattctcctgcttcagcctctggagtaactgggattacaggtacccaccaccacacctggccaatttgtatttttagtagagacggggtttctccatgttggccgggctgggctcgaactcctgacctctggtgattctgcctgctttggattagtttagatatcattagtttattataaaagacagacatggaaattatttacatgatgaatgatttcagaactttagtggaacgggcagcttcacgttgatgccatttcaatagtgatttatttcagtttacatactttccaagagtgtcaccatctctaaatgaataatccttgtcatgtagagctgctttggcacctctatattctggaagaactttatctccaactttttttttttttttgagacagagtttcgttgttgttggccaggctgcagtgcaatggtgcgatctcggctcactgcaacctccacctcccgggttcaagtgattctcctgcctcagcctcctgagtagctgggattacaggcactcgccaccatgcttggctaatttttgtatttttagtagagacggggttgcaccatgttgattaggctggtctcgaactcctgacctcaggtgatccacccgcctcggcctcccaaaatgctgggattacactggcgcatgagccacggcgcacggcctatctccaacttttacactgactggttgaatctctctctaccctttcgttcagagcctgacccagcagctactgctgttgcttgccatacttttctttgagatttttctgaaaggataatgcttcctttggttacgatttcagtggcacttgtttttctttttcttttctttttttttgagatggaattttgctcttgttgcccaggctggagtgcaatggtgcgatctcggctcactgcaacctccgcctcccaggttcaagcgattctcaagcctcagcctcctgagtagctgggattacaggcatgcgccaccacgccctgctaattttgtatttttagtagaggtggggttttgtcatgttggccaggctggtcttgaactcctgacctgaggtgatccacccgcctcggcctcccaaagtgctgggattacaggcatgagccattgtgccaggctggcacttgtttttcaaccaacgctcagtcaaagaggaagaaacttctttatgagatggagtctctctctcttgcccaagctggagtgcagtggtgcgatgtgtgctcactgcagcctctgcctcccgggttcaagtgattctcctgcctcagcctcctaagtagctgggattataggtgtgcactactgcttctggctaatttttgtatttttattagagacggggtttcaccatgttggtcaggctggtcacgaactcccgacctcaagtgatccacccacctttgcctcccaaaatgttgggattacaggcctaagaaactttctaaatgcttttcctgccatgactcccagcactacacgtcctactctgccctcgtactgtgctggaaggagagacccctgatgtcctttttctgtttcaggattctaattgcatttagttatttctctttattctcttatggtttgtaacgattcctgcgactttccttatcttttgtgactttgacacttttgaagattgctgatccattgtttatagggtgtccctcgttttggatttgtttgatgttttctcatgaatggggcgaggttatgcattccttctcattgccccatatcaggagattcatgatgtcagtatgatgatgattaccttgactacttggttaagttggcatcttgctggtctttctattgtggagttattctctttccttttgtagttgataagtatcttgtgggagatatttgatgagtttgcaaacaatgttagaatcttctcaaactttggttctcaattttagcaactgatggagcttgtctgcaacatttattgcttttgtggttgcccaattgtgactttctatttcactctttccttctacatttattgattataattctatgaggaaaagctttctttcctccatttttattattcatatcactatggactcatgggtatatattttattttatgggttaaaatccagtaactatcattgtttgttttcttactcagattgttctagctttggccatcaggaattccttcaggttgatttctgtgttctttcaagaagccattatcttttttttttttttttgagatggagtttcgctcttgctgcccaagctggagtgcaatagcacaatttcggctcactgcaacctctgcctcccaggttcaagcgattagcttgaacacagcctcctgagtagctgggattacaggcacctgccatcatgcctggctaactttatgtatttttgtatagacggggtttcaccatgttgcccaggctggtcttgaactcctgacctcagatgatccacccgcttggcctcccaaagtgctgggattacaggtgtaagccaccgcacctggcatctggataatttttcagttttttgtagagatagtcttactgtgttgcccaggctggtctcaaactcccagcctcagttgatcttccagccttggcctcccagagtgctaggattacaggcatgagccaccatacctggctcactgcagcctccacctcatgggttcaaacaattctcctgccttagcctcccaagcagttggaattacaggcgtgcgccaccacgcttggctaattttttttgtatttttagtagagacgaggtttcgccatgttggccagtcttgtctcgaactcctgacctcaggtgatcagcccgcttcggcctcccaaagtgctgggattacaggcgtgagccaccgcgccagcctttttttttctttttttttttttaaacccttgctctgtcacccaggctgaagtgaagtttgatcatagctcactgcaatctcaaactcctggactcaagggatcctcccattttagcctcctaagtagctgggactacaggcacacaccactgtgcccagctaatttttaaaatttttggagagatagggataggggtctcactttgttgtccagtctgatcccaaactcctgggcttaagcaatcctcctgcctcggcctcccaaagtgttgggattataggcctgagccactgcacccagcccttgtttttttatttttaagctttgccaacatctgagttccccgacaatcgtgttcttaattcttgttaatatgttattagagttagaaaggattccttcttatattgcagataaaagaaggaaatgtgtagaaggtttttttttcttttttttctttttttgcccttttttttgtgcctcaaatctgaaggccttttatgtatagattgtactaggacctgcagatctagtgtctttactcatcataggtaacaattggatttagcgagaaaatataggtatttctgtttttgagtttcgttaacagcaaattgtttagatgggattaaaggcccaaaatgtactctagttatctttgtggaacccatggatgaacacctatatatatagagagagagtgtgtgtgtgtatgtatatgtatgtacgtgtgtatactcaccgttggactcaaactcaggtaattctactgcctcagcttcttgagtaggggggattacaagtgtgtgccactgtgcctagtttatgttgtgttttagtggtgttaaatcttgtgtaccaggtcagaataattgttttagttggaggagctaagttgaaataagtatttggttatcataagttacagttcataagcactttaaaaataaccccttttcttcaattaactatatattggcttggtgtgttggctcacacctgtaattctaacactttgagaggccaaggtgggtggattgcttgagcttaggagtttgaaacccccctgggcaacatggcaaaacctcgcctctaccaaaaatacaaaaattacctgggcatggtggtatgtgcctctggtcccagccactcaggaggctgaggtgggtggattgcttgagtccgtgaggtggaggctgcagtgagtggagatcgcaccactccactccagcctgggtgacagannnnnnnnnnnnnnnnnnnnnnnnnnnnnnnnnnnnnnnnnnnnnnnnnnnnnnnnnnnnnnnnnnnnnnnnnnnnnnnnnnnnnnnnnnnnnnnnnnnnnnnnnnnnnnnnnnnnnnnnnnnnnnnnnnnnnnnnnnnnnnnnnnnnnnnntctcatgctttcagtgctttcagtgacattgaagctttggtcagttcataagggcaccagtgtgaaattagttcatgataaggacaattgtgagaaacctccagttggtcaaatagccttcggaaacttactgctcattattctttctgatttttcttggaatattttgagagaaaagtcattattcccttgtatttcagaatcatgttaatgaggtagcttaactgctattcagctgcaggctcaactgagtgaaaaaggacaactagtaatggtaaactgaaggaaagactagtggaatcttgagaaagaataagagaaaaaagagaaatgttattgttttgatattacagattaagctaaccacagtacctgattcttagcaggtgcacaataattatttagtcaataattaatggagcaaatatttattaagtaacattgtatgtctgtgctgtctattgaagaatatacaaaagaaacctgaggctgggtgtggtggctcacacctgtaatcccagcactttgggaggctagacagaaggagcacttgagcctaggagtaggaagaccaacctgggcaacatagggaaaccctgtctctaccaaaaaaaaaattagccaggtgtagtggtgagcaggagggtcactctagcccaggaggttgaagctgcagtgagttgtgatcataccactgcactccagcctgggtaagaaagagagcaagatcttctcttaaaaaaaaacaaacaaaaaaaaactacaagaaaaaaacagtactctcaaatggaggtacgagatcagaaccttgaaagtcagtgaggactaggggaataggaagtagtatttgggctgacttgaagttgaggggaaggacatctacagttgagggaaatggtatgggcagagtcgtggtcagtggttaggaaatggtgtatggtgtatatggggtagtccgaagatccactgggataaaatagaaagcagcaaatgtgcatctgacaattttggagaacctttggatatctaactgtataatttattattcatttattattattttttgagatagggtcttgctttgttgcctaggctggagtgcagtggtacgatcatggctcactgcagcctcgacctctcaggctcacgcagtacttctgcctcaacctcccaagcagtagggaccacaggtggtcccaggttgatattttgtagagacgaggtttcactatgttgcctagcctggtcttgaactcctgggctcaagcgatcctctggctccagcctcccaaagtgcgggattaacagatgagagccactgtgcccggcctaatttttccaaggttttccaaggttttgctgaggtacatcctgtctagagggaaatgaaaaggaaagggtgatcatatcatgaaagctatcataaaggaagaaaaatagggatttgactatctttgatttctgaaagaagagttaaagttgactccagggttttgagactagaaaatgatgctgtcattgatagagtaagaaagatgtaggatttaattttatacgttgttttgagatagtggacagataaattcagtttaggacatgttggatttgaaatgagtgaaatatccaactcattttacaaacaaatggagataactgaagatgtttggaaatagggagatggaagtcagatgagcagaaatggttggaaaaacaaatctgtgataatataagcataatggagagagggaagagaaaagcaaagattattagtctatgcagtgtctggttacttgaggaagatgaggaagcttacagaaaagagaaagaagctgctgagaggaaagaggaggatcaacgcagcacaacctttaaactatccagaatagattcccactgagttttgtttatgtaattggaggaagtgacatttaatccttgatagctagtttttgattgaaagctcttgagtttttttttgttgttttttttttttttgagacagagtttcgctcttgttgcccaggctggagtgcaatggcgccatctcagctcgctgcagcctctgccctcagggttcaagcgattctcccatctcagcctcccgagtagctgggactataggcatgtgccaccacgcccagctaatttttgtatttttagtagagatggggtttcaccatgttggccaggctagtcttgaactcctgacctcaagtgatcctcctgcctcagcgtctcaaagtgctgggattacaggcctgagccactgcacccggctttttgtgtgtttctttacaagtctaaaattagttcttaaagggctttggtttggagagttacatttaagtttatacttttgcttattttctataatcatatattttagaaataaaaaaacttctcaaaatatttatttatttattttttagatggagtttcactctttcacccagggtggagtgcagtggcgctgtcatagctcactgcaaactcccaactcctgggctcaagcaattctcccgcattagcctcccaagtggctgagattagaggtgtgaggcaccgtacctgactaaaacttcaaaaatatgtaaatcacttgctgtctccctaataggctgctgttggggttctgggcagtagttactgtgaaatcattaatttgaacctggagttttcaataaaagattttaatatgctaatcaggaattgaacagagcatgataaactccattactatccttagttgataaattttaagcagaagaaaaggaactgtttcagttagcttgtctttgcctcattattgtggattgatgtataatttctttctttctttttttttttttttttttttttttgagacagagtctcgcactgtctcccaggctggagtgcagtggcacgatcttggctcactgcaacctccgcctcctgggttcaagcgattctcctgcctcagcctcccaagtagctgagattacaggcacctgccaccatgcctaggtaggttttgtatttttagtggagatggggtttctctatgttggccaggctggtcttgaactcctgacctcaagtaatccacccgcctcagcatcccaaagttctgggattacaggcgtgagccactgtgccccgctggcctatatatttaaaaaatatatttctggtttcagtttcagcctttgtttatggttagtcacaggtttgtagtagatagtttataagtgagtaaaattgaggcatattgtttcaatactcaaataatgagacaatagtgaaaatacctgctcatcaaaatgtaggacatcttttatcatactgctaaagagatatatagatggagagatacatagatgcatagatacatagcatatatctgcatctccttattaatagttcagctagaatttgaaatattaggttaaattggctgcctttgaatgaaaaaggaacttctatttgtgttcagggtataatgctcagatgaaccgttggatatgcaaccagaaagcagttaggaagtgtttttcagtttagtctttcactggaaaccaaaactttgaaaaatatatttggagcggaggctacttatgacagaaggattcttaaagttcaactacttttgactcagaaggaaaactaagttgaaaatactcaaaaccagaaaaatagataatttcgtagaatgttgcaggttgttttgcctttctggctctcacaaaaaaggttagtgattgatactgtatctgcatattttctattcctttctctgtactttagttaatagcattttgtgattaaaaaaaatacgcccttgacttacttttcttgttgttattgaaagcagtttttcctgtgtctgagcatgtataacattagtgatctatatagagagtttgtttattgcaaccagaggcacattcctagggaagaatggtttttgaatgttccgttatcttatttccagtaggacatctttagaaatgagcaaattccattaaactaataaccctgattttggtggataagcacttatactaattctgctttgagaaaagagattgttcactctgctttaggagctgctggctaagtctggtgcttcttaacctttaactaagaaaaatgaggcttgctgacaataggtagtttttactggcctgtgaaacccaacagcatgttcagcaatgtaaaccacagcagctatcttttgctggcttcactgttgtttgaagtataatgaaatgcttcttggccggtctcggtggctcacgcctataatcccagcactttgggaggccaaggagggaggatcacctgaagtcaggagttcgagaccagcctggccaacatggtgaaatccagtctctactaaaaatagaaaaattagtcgggtgtggtggcacatacctataatcccagctactcaggaggctgtggcaggggaatcacttgaacctgggaggcggaggttcccctgagccaaaattgtgcaattcattgcactgcagcctgggctacaagagcgagactccgtctcaaacaaacaaacaaacaaaaaaaagctgcatctcacaaattgctgtacctgctgactcatcttcaagcccctaaacaaccatagtatccagcattattgaatgctgggacttgagaataaagagaaccagaatcttagaatgcgagggttagaatggattatggaaatcttttaactcacctccttctcaaatggtctcagctattaaaaataaatgttactgtggtagctgtcatagtagatagttaaaagaatgatagtgctattcagaatgccgttagaatcttctagatgagtgaagacttttgtctgtctaagagtctttgagatgtagtctttgagatgtagtactttttagcttcccttcaaaaataacacatcctgaaagtggccgaaagctactaggggcagcacacatcagtgtctgctatacacttcaggagaactgtgggaagaagtaaaaatgaagagtggccattgtccctgaaagtttcttaatctaattagaaaatagatttgagaaaggagggaactttggagcatttaggaatcattttgtgattatttaaaaattattttggaaacagcatattcctttgtttcccaggctggagtgcagtggctattcacagatacagtcacagctcactgtagcctcgaactcctggcctcaagccatcctcctgcctcagcatcttgagttgctaggatgacagagtgtgtacatcgtgcttggcttgaatggatcttttacctgtgtgtgattttgtaatatcatgcattggttatttggaagattataccattatgcatcagttatttgaagataattgttcattaagttatgtaaattttccaaatgttgatatattttattatatggcataaaataatgttattaatagctaataccgcaatgacctcatagggaaagtattttgggaagctctctgggtcatggtagtagataccagctcactgtgacttgtaatgactggaaaggtaattgaagttgcattaggaaacagtctgggagttgaagggaaatggattttacttttataaagaagcttcatgttgaaggccctgtaagggggcgttttatttttctggttttttttttttagtgttagcaagtttgattccatctaaggagtacgtaacaaaaagtagttggccttttcaaatttgtgaacccaaagatttttttaaaaattttatttgcttttttttttttttttttttgtagagacagggtctcgctctgttgcccaggccagagtacagtggcatcatcttggctcactgcagcactgaccttccaggctcaagcaatccacctgcctttgcctcccaaagtcttgggattataggcgtgagccactgtgcctggcccaaaggaatttctgtgatggaatgtatagtgtacttctgagcttgcctgctttttctaggtgcttggttccctgtcagttatagatccgggagtctttagaacttcttctgagccttttaatccctccattctccagtctgaagctagacctcagaattgtctgattagagtcctggatcagtcttacctcatggaattggtttcactttttccctaggcttagttactgtcttcttttgtttgaacttgtcttttatactaaactagtatctagagtgagacagggattaggatgaatctctttttccaagtggagtgggtgagacagtttgacctaggagtttcttgtggccctaggtaatgtaacagaaactggactgttgttgtattaaattttgttagtattctaagagatttttttaacatatattcaaggaataccttgaaattagccctgttttttttttatttaatacaatttgcttttatagaattatactttgaaagttggtattcaagtaagattctgattgttctcatgtcatctttcatgacatgagtaaaccttttgaaacatgctgaaggcctagtgataggacattgggcaaattacagactatataggtattgaaatactatataaccattaaagctgggcatggtggctcacgcctgtaatcccagcactttgtgaggccaaggcgggcggatcacgaggtcaggagatcaagaccatcctggctaacacggtgaaaccctatctgtactaaaaatacaaaaaattagccaggtgtggtggcgggcgcctgtaaccccagctacttgggaggctgaggcaggagaatggcgtgaacccgggaggcagagcttgcagtgagccgagatcgtgccactgcactccagcctgggtgacaaagcgagactccatctcaaaaaaaaaaaaaaaaaaaaaaaaaaagaaagaaatactatataaccattaaaaatgttgcggaaacatttactgatataaaaaagtgcacattttctccgtggaagtcagttaaaagtagcatgtatattcaaattttatttaaaaaatacattaggaaaaagtgcttggtgcttggttatgcaacagtgttcatgtggttactggttgctggtgagattaggtcatttgatttttttctgtagtaagtgatattttgtttaatcactttatttatttgtttatttagagacggagtctcactctgttgcccagcctggagtgnnnnnnnnnnnnnnnnnnnnnnnnnnnnnnnnnnnnnnnnnnnnnnnnnnnnnnnnnnnnnnnnnnnnnnnnnnnnnnnnnnnnnnnnnnnnnnnnnnnnnnnnnnnnnnnnnnnnnnnnnnnnnnnnnnnnnnnnnnnnnnnnnnnnnnnnnnnnnnnnnnnnnnnnnnnnnnnnnnnnnnnnnnnnnnnnnnnnnnnnnnnnnnnnnnnnnnnnnnnnnnnnnnnnnnnnnnnnnnnnnnnnnnnnnnnnnnnnnnnnnnnnnnnnnnnnnnnnnnnnnnnnnnnnnnnnnnnnnnnnnnnnnnnnnnnnnnnnnnnnnnnnnnnnnnnnnnnnnnnnnnnnnnnnnnnnnnnnnnnnnnnnnnnnnnnnnnnnnnnnnnnnnnnnnnnnnnnnnnnnnnnnnnnnnnnnnnnnnnnnnnnnnnnnnnnnnnnnnnnnnnnnnnnnnnnnnnnnnnnnnnnnnnnnnnnnnnnnnnnnnnnnnnnnnnnnnnnnnnnnnnnnnnnnnnnnnnnnnnnnnnnnnnnnnnnnnnnnnnnnnnnnnnnnnnnnnnnnnnnnnnnnnnnnnnnnnnnnnnnnnnnnnnnnnnnnnnnnnnnnnnnnnnnnnnnnnnnnnnnnnnnnnnnnnnnnnnnnnnnnnnnnnnnnnnnnnnnnnnnnnnnnnnnnnnnnnnnnnnnnnnnnnnnnnnnnnnnnnnnnnnnnnnnnnnnnnnnnnnnnnnnnnnnnnnnnnnnnnnnnnnnnnnnnnnnnnnnnnnnnnnnnnnnnnnnnnnnnnnnnnnnnnnnnnnnnnnnnnnnnnnnnnnnnnnnnnnnnnnnnnnnnnnnnnnnnnnnnnnnnnnnnnnnnnnnnnnnnnnnnnnnnnnnnnnnnnnnnnnnnnnnnnnnnnnnnnnnnnnnnnnnnnnnnnnnnnnnnnnnnnnnnnnnnnnnnnnnnnnnnnnnnnnnnnnnnnnnnnnnnnnnnnnnnnnnnnnnnnnnnnnnnnnnnnnnnnnnnnnnnnnnnnnnnnnnnnnnnnnnnnnnnnnnnnnnnnnnnnnnnnnnnnnnnnnnnnnnnnnnnnnnnnnnnnnnnnnnnnnnnnnnnnnnnnnnnnnnnnnnnnnnnnnnnnnnnnnnnnnnnnnnnnnnnnnnnnnnnnnnnnnnnnnnnnnnnnnnnnnnnnnnnnnnnnnnnnnnnnnnnnnnnnnnnnnnnnnnnnnnnnnnnnnnnnnnnnnnnnnnnnnnnnnnnnnnnnnnnnnnnnnnnnnnnnnnnnnnnnnnnnnnnnnnnnnnnnnnnnnnnnnnnnnnnnnnnnnnnnnnnnnnnnnnnnnnnnnnnnnnnnnnnnnnnnnnnnnnnnnnnnnnnnnnnnnnnnnnnnnnnnnnnnnnnnnnnnnnnnnnnnnnnnnnnnnnnnnnnnnnnnnnnnnnnnnnnnnnnnnnnnnnnnnnnnnnnnnnnnnnnnnnnnnnnnnnnnnnnnnnnnnnnnnnnnnnnnnnnnnnnnnnnnnnnnnnnnnnnnnnnnnnnnnnnnnnnnnnnnnnnnnnnnnnnnnnnnnnnnnnnnnnnnnnnnnnnnnnnnnnnnnnnnnnnnnnnnnnnnnnnnnnnnnnnnnnnnnnnnnnnnnnnnnnnnnnnnnnnnnnnnnnnnnnnnnnnnnnnnnnnnnnnnnnnnnnnnnnnnnnnnnnnnnnnnnnnnnnnnnnnnnnnnnnnnnnnnnnnnnnnnnnnnnnnnnnnnnnnnnnnnnnnnnnnnnnnnnnnnnnnnnnnnnnnnnnnnnnnnnnnnnnnnnnnnnnnnnnnnnnnnnnnnnnnnnnnnnnnnnnnnnnnnnnnnnnnnnnnnnnnnnnnnnnnnnnnnnnnnnnnnnnnnnnnnnnnnnnnnnnnnnnnnnnnnnnnnnnnnnnnnnnnnnnnnnnnnnnnnnnnnnnnnnnnnnnnnnnnnnnnnnnnnnnnnnnnnnnnnnnnnnnnnnnnnnnnnnnnnnnnnnnnnnnnnnnnnnnnnnnnnnnnnnnnnnnnnnnnnnnnnnnnnnnnnnnnnnnnnnnnnnnnnnnnnnnnnnnnnnnnnnnnnnnnnnnnnnnnnnnnnnnnnnnnnnnnnnnnnnnnnnnnnnnnnnnnnnnnnnnnnnnnnnnnnnnnnnnnnnnnnnnnnnnnnnnnnnnnnnnnnnnnnnnnnnnnnnnnnnnnnnnnnnnnnnnnnnnnnnnnnnnnnnnnnnnnnnnnnnnnnnnnnnnnnnnnnnnnnnnnnnnnnnnnnnnnnnnnnnnnnnnnnnnnnnnnnnnnnnnnnnnnnnnnnnnnnnnnnnnnnnnnnnnnnnnnnnnnnnnnnnnnnnnnnnnnnnnnnnnnnnnnnnnnnnnnnnnnnnnnnnnnnnnnnnnnnnnnnnnnnnnnnnnnnnnnnnnnnnnnnnnnnnnnnnnnnnnnnnnnnnnnnnnnnnnnnnnnnnnnnnnnnnnnnnnnnnnnnnnnnnnnnnnnnnnnnnnnnnnnnnnnnnnnnnnnnnnnnnnnnnnnnnnnnnnnnnnnnnnnnnnnnnnnnnnnnnnnnnnnnnnnnnnnnnnnnnnnnnnnnnnnnnnnnnnnnnnnnnnnnnnnnnnnnnnnnnnnnnnnnnnnnnnnnnnnnnnnnnnnnnnnnnnnnnnnnnnnnnnnnnnnnnnnnnnnnnnnnnnnnnnnnnnnnnnnnnnnnnnnnnnnnnnnnnnnnnnnnnnnnnnnnnnnnnnnnnnnnnnnnnnnnnnnnnnnnnnnnnnnnnnnnnnnnnnnnnnnnnnnnnnnnnnnnnnnnnnnnnnnnnnnnnnnnnnnnnnnnnnnnnnnnnnnnnnnnnnnnnnnnnnnnnnnnnnnnnnnnnnnnnnnnnnnnnnnnnnnnnnnnnnnnnnnnnnnnnnnnnnnnnnnnnnnnnnnnnnnnnnnnnnnnnnnnnnnnnnnnnnnnnnnnnnnnnnnnnnnnnnnnnnnnnnnnnnnnnnnnnnnnnnnnnnnnnnnnnnnnnnnnnnnnnnnnnnnnnnnnnnnnnnnnnnnnnnnnnnnnnnnnnnnnnnnnnnnnnnnnnnnnnnnnnnnnnnnnnnnnnnnnnnnnnnnnnnnnnnnnnnnnnnnnnnnnnnnnnnnnnnnnnnnnnnnnnnnnnnnnnnnnnnnnnnnnnnnnnnnnnnnnnnnnnnnnnnnnnnnnnnnnnnnnnnnnnnnnnnnnnnnnnnnnnnnnnnnnnnnnnnnnnnnnnnnnnnnnnnnnnnnnnnnnnnnnnnnnnnnnnnnnnnnnnnnnnnnnnnnnnnnnnnnnnnnnnnnnnnnnnnnnnnnnnnnnnnnnnnnnnnnnnnnnnnnnnnnnnnnnnnnnnnnnnnnnnnnnnnnnnnnnnnnnnnnnnnnnnnnnnnnnnnnnnnnnnnnnnnnnnnnnnnnnnnnnnnnnnnnnnnnnnnnnnnnnnnnnnnnnnnnnnnnnnnnnnnnnnnnnnnnnnnnnnnnnnnnnnnnnnnnnnnnnnnnnnnnnnnnnnnnnnnnnnnnnnnnnnnnnnnnnnnnnnnnnnnnnnncaaaacagtgcatgtgttttataaataatacaaattatatagatttatttatttatttattgagatggagtcttgctctgtctccaggctggagtgcagtggcacgatcttggctcactgcaacctccgcctcccgggttcaagagattcttctgcctcagcctcctgagtagctgggattacaggtgtctgccaccatgcctggctagttttttgtatttttagtagaaatggggtttcagtatgttggccaggctggtcttgaactcctgacctcgtgatctgcccgcctcagcctcccaaagtgctggggttataagcgggagccactgacccgcccaaatcctgaaatttctgaaacaactatatctttaggtaacttactagcttttgaagagttcaggtttgccttttattacaattattgcattgatactagtagtattttatagactttcttgtgtgaaatgaaaagctccttgtgactattaatttttcttattccagttattgaattgctattgtcaccatataatatgtaattttatttatttatttatttttgagatggagttttgctcttgttgtccaggcgggagtgcaatggcatgatcttggctcactgcaacctccacctcctgggttcaagtggttctccttcctcagcttccctagtagctgggattacaggtggccaccaccatgcccggttaatttttttgtattttttagtagagactggccatgttgctaggctggtcttgaactcctgacctcagctgattcacctgctttggcctcccaaagtgctgggattacaggtgtgagccaccccgcccagccaattttaatattttttaaatataaaattgcctttctgatttgtatgtcattagttattgaaattaactgttaatagccatatgtttgcccttcatttactgtactttaaagtttttgagacagggtcttgctgtattgcccaggcaggaattcagtggtgtagccatggctcacctcagctttcagcttcaacctcatgggctcaagcgattttcctgcctcagcctcccaattagctaggactacaggtgcacacccctatgcctggctaattaaaaacatttttttgtagagactgggtctcactatgttgctcagactggtctgcgattcctgggctcaagtaatcctccaacctctactcctcaattttttttagttttggagacagggtcttgctgtgtttcccaggctggagtgtagtggcacaatcttggctcactacagcctcgaactcctgggctgagttgatcctcctgcctcagctttttgtgtagctaggactacagtcctgtgcccaccacaatcagctaattaaaaaagaaatttaaaaatgttttttgtagagatgaggtcttgctgtgttgcccaggctggtctcaaacatttggcctcaatgatcctcctgtggtggcctcccaaagcactgggattgcagatatgagccactacacccagcccatttactgtaatttttagcctttgagaattttgtgatattggctagattttgccatagagatttgtaagtaaccaaattttattcctaacattgactactagataactgaatggttttggtgagactttaccattcacacttgaatatttatgttttctttaagggaaatcacaatgtatataagtttttaattttgtttcaaatgaattccatttgataaaacacgtagcatagctaggtggggtgactcaaaccagtaatcccactgagtcaggggcctgagtgggagtatcctttgaggctacgtgtttgagaccagcctgggaaacatagtgagaacctgtctcttaacaaaaaaaaaggcataaaataaactggacacttttaagaggtatgttggtccggatcattggttttagaagatagagcaaaacttgagagttaaaccctagggttttttttgtttgtttgttttgttttgttttttagctctgattctactagaagtagtcatgtcatctttggcaattctcttaatgtaacattttggaacttggtttccttgtctatatgagagagttgatgataccttacaagttgtactgaggattacatgagccctccatgcaaaatactaaatacactgatacagatatggttggtactcaagaaataatggcatatttttttttttcttgctatgttgcccaggctggtctcttaactcctggcctcaagcagtcctcccaccttggcttcccaaagtgctagaattacaggcatgagccaccatgcctggccaagaaacaatgctgttattactctagctagcagaaaacaaaaatcattttctggagaattagactatttaacaaggcacatgcttatcagtacgtgcgttacctcttctagtgttctgctgtgttgatattagtgaccaagatctgcatagtttgagaaccctctatttcaaggattaggaggtagaaagcttatgagaaagaaatctggcctggtaaaatgcaccttcgtgggctttttgaaagatgggactcattctttgtctttcagtggtttattataatctattaaaatttactttatgacctgagacaaagccattttactatttaggctcagtttaacattgttaaacctgtctactattcagagtgtaccaaggtgcttttatttcttaagagttctgttgtatttcatccataaaaatgattgaagcagggtcaggaaccagtggctcatgcctgtaagtctagcactttgggaggccaaggtggaaggattgcttgaggccaggagtttgagaccagcctaggcaacacagcgagaccccatctctacgaaaaaaaaaaaaaagatgggtgtgctgctgtagtgttagtttatagtcctagctgctcaaagagctgaggtgggaggctccctcaaggggatccctcaagattgaggctagaatgagttatgattgtgccagcgcactttagcctgcacaacagtgagactctgtctccaaaataaataaataaatagattgaagcagataactgataactgttattgttatgggagggatgttatctcccaaagattacccatagatacttggaattaatttttggagctctatttggactatcagagctctcttaaaacatgacattgcttgcaccaaaaaaatagaagccaagggggcaaaaaacatgaaattgcttcatttagttatttgctttcttaaaaaatattttgggtctggcatagtgtctcatgcctatgaaccttgagaccaggagttggaaaccagccagggcaacttagggagacctcatttcttttataaataagttttttctttttttggagacagagtcatgctctgtcacccaggctggagtgcggtggcatgatcttgacttatggcagcctccacctcctgggttcaagtgattctggtgcctcagcctcctgcgtagctgggactacaggcacatgccaccacacccaggtaatttaaaaaatatttttagtagagatggggttttgccatgttggccagcctggtcccaaactcctggcctcaagtgatttgcccacctcggcctcccaaagtgtataaataaaaatttttgaaaaatattttgtatgtttaataatttgttcattataatgaaatttattttgtgctacagaagaaataaatgtatcttactgtacattatagacataacgttagtaaatggaattccctgtagttgcacacctccttggttaactgtttgaagtctttctccagactttctatgcccattacagcattttaaattttaactaaaatgttgtatactgttttatagtattctttcttagttatccttttatagttttctttcttttccttttcccctttcctttcctttccttctctttctccttcttctccttcttcctttcctttgctctcctttctctttctttctttgtctctctttctctctcccctcccctcctctcctttatttttttcctttctttcttgacgaattctcactttgtcgcccaggcttgagtacagtggcgcaatatcggctcactgcaacctctgcctcccaggttcaagttattctccagcctcaacctccctagtagctgggattacaggcacccaccaccacacctagctaatttttgtatttttagtagagacagggtttcatcatgttggtcaggctggtcttgaactcctaacctcaagtgatctgcctgtctcggcctcccagagtgctgggattacaggcatgagccaccacatttggcctattttttctttttaatgtaatttctttagtaacagttttatgtttcagtaatagatatctatttccattttttggaaatgactagaattacttatggatgctgcttaatttatttttatgcaattctttctaatctacttgagttatttctgtttttcttatattatgaaccatgctgcactcaacatttttatacagcttcttttacttgaatggatatttttggggataaattatagaagcagatcaaaatgtatgaagggaagtatgtcagagtatgaagtgggtaaaaaggttgtggaaattaagtgttagctattatgagttttaaatggtttggttcctgattccatttagatctttattgtttttcttcatttttgtttgtatttactttgtattattttgctttgttgcatgtattctagttagccacttaaaaaaaatttaatttttggggagctagggtctcactctgtcacttaggctggagtacggttgtacgatctcaactcactgcaacttccaccatccaggctcaagcgatcctcctacctcagcctcctgagtagctgggactgcaggcacatggtgcaccacactggctaatttttgtattttttttttttgtagagtgggggtttcatcatgttgcccaggctggtctcaaactcctgggctcaagcagtccacccaccgcaacctcccaaaatgctgggattacaggcatgagccattatgcctgaccattagccacttttagattcctaatacatgttttttccctgaggtgaggtctaactgtgttgcctaggctggccttaaatgcctggactcaagtgatcctcccacctcagcctcctgagtagctttatgtttcagtaatacatatctatctccatttttttggaaatgactgagattataggcacatgccagtgtgccacgctaaattctctttataacaaaattagggaaatattatcttgaatctttgggtggtactgattagcattttgtttttttttttggagacagggtcttgctctgttgcacaggttggatggagcgtggtggcataatcacagctcactgcagcgtcgatttcccaggctcaagcgattcttccccttcaacctctctagtagctgggactacaggcccacactaccacggctgactaagttataaaaatttttggtagagtcagggtctcactatgttgtccaggctagtcttgaactcctaggttcaaacgatcttcctgtcttggcttcccaaagtgttgggataacaggcatgagccactgtttctggcctaattagaaaattttaaaaacatttttctattccctgcaccatttctctcctacagggttggatctgttttttgtcttgtttcttcactttcttaatgtaaaatagaaaacatactgtagtgttgtaatcactaagtaagcaggatcttgttttttttttttttttctcttggtaggaaaaaaatacaaaagttcttttgaaataaaaatctttctcacactttttttttttacatagaactacacatacacacacacacacacacacacacacacaaagaaaaaatatttttctcaaatagaaatggtaatgttcaattcaaacacacatgctatcccacagcatttcttcttcattcagtgtgttgtagattcttctgtaacatggcacagaaagagaaacagtttggtgagtggttaagagccccagttggagttggttgacacctcttcgtttatgtagtatgaccttgggcagactgcattgctgctgtgcactggggttttctattttgaaatatgggaattataattgttcctaggatttttttgagggttaacattaacttgtgaagttcttagaacagttggttcaagatatttagctgaataaatataaactgtaatgtaatgattataatataattttctcatttaaaaaatatatatgttacggatttatcacattcattaagtcattctcaaattgatgtgcagaaaactttattttagaacacgttatttttcccttagatgttttcaaagtgatggtttttattttagtaactggtaacaagtcttattttgctcttagttccttcagtgaagaacgtaattgaagcttcaaagtgtttataaaatagggaagtaattaactgcttttcattcctaaccctggatatgtctgcttttctcaggttctattttgtatagtttttacaatatagtcttgttttcaaatagtagtcttcacatcagccattgctgaaaactgcttactttaattttatctttttataacctgctgcataaataattttgccaaggccaggtgtggtggctcacgcctataatcccagcactttgggaggccaaggcaggcggatcaaatgaggccagttcaagaccagtctgggcatatggtgaaaccccatctctaataaaaatacagaaattagccatgcatggtggtgcattcctgtagtcccagctatttagggggctgaggcgggaggcccacttgaacccaggaggctgaggttgctgtgagctgagatcacgctactgcactccagcctgggcagtagagcaagactctgtctcaaaaaagaaaaaaaaaatttgcccatgctactgggaccttcaattttagtgaaaggaagaacattttattgttcctattctgttttttctgtaggttattgccttctttgcaattggaaaatcagtttcatgatgattttgttattgtgttggttatccacaaatgtctagagaatactgtattttcctgagaaagacacattatgacatactgttacagagagaagacagcctcaaccaaatctggagaaggtttttaagaatgtgggaaatgcttgctaactttttaaatcactgagcaaagttagttaatattttcattagacttgggtgacccaagtaaggaatcctttacatttttttctaatggaagaaaatactgtcttaatcaggataattctagggatggggtaaggctaggatagttgtactcagtgctagctgttggaatcagttttgtagtttaaattatatagaccagtgtgggcctgtagtcctagctactcgggaggctgaagcaggagtttggcttgaggccaggtgttcagggctgtcttttgtgatgatcgtggctgtaaatagccactgcactctaagttggcaacatagtgaaacccatcttaaaaaaaattaaatagatctgaatcagattttgcagctttagttttagatataccatatagttaagacccctagcttaagagaattaggatgctcagtagtgagttcatttaggtcttgcatataatataaaggatattaacttggtttttgccttgttatttgcacaatacctttttcgaaagctttgagttaccagcatgatgctgattgttggatttagagcctattgtttaagttttttttgtttttttccgagacagggtctcactcggtcacccaggctggagtgcagtggtgagattgtagcttactgctgcctcaaactcgtggcctcaagcgattctcctgcctcagcctcccaatgttctgggattacaggtgtgagccaccacacccagccttcttgttaagatttttggcttgtcatgatccagaaataagttgattatttctcaatggatatattcttttagtttcttttctagagtaatagtataaacagggtttggcaaatgagtagaggaagatgttttttccctttgaagtggatttgttttgggacctgataaagtgcaaaccaagcatgttgtacttgacatcttcttggaacttggaatatttcattaccagttatctaattggtcaaagttagaaactaagttgggcatggtagctcatgcctgtaatcccagcattttgggaggccaaggcaggaggattgcttgagcccaggaggtcaaggctgcagtgagctgtgatcacactgctgcattctagcctgggtggcagggtgagactttgtctgaaaaaacaaagcaaaaaaacccaaattaatgggcaatgatagtatttagctattttttttccatgaggaagtgattttttttctttatttttttgaaacagtcttgctctgttgcctaggctggagtacagtggtgcaatctcggctcactgcaacctgggcctcccaggttcaagcgattctcctgcctcagccacctgagtagctgggattacaggcgtgtgccatcatgcctggctatatttttagtagagacggggtttggccatgttgaccaggctggccttgcgctactgacctgaagtgatctacctgcctcagtctcccagggtgtgggattatgggtgtgagccactgtgccccacaggacatcttgatattaattaagatcattcatatttcctttggtttggtctgtgctgaaccttctgacatgtacaacctccttggtttagggaaggagggcttaggaattctctcttttttgtttggagtgaacttgtgcattttttactctgttccacatttttcttcaggtcactcttgagggacttgggtcattgtgattcatgtacctattgagttaattttcgtgacttctttctagacagtgaagagccagagctctgacttttagcttcggggactgattctataaatatggatggacaggtcatttaaatggattgcattaatacagttaatggcgtttccaggatgttttgaaattttcccctctgtgtttcttatgcaaagagcttacgtttgatgttgtggtctgactttgatgaactgtgttacctgggctatttctagtgtaattcagtgcaaaaggaggaggaacagttttactccatatcagttaattcagaaaagtagagttgtggttttaatttgttgggttaatgagtgtcattgtcacaccatgaatgtgcccaaggtagttaggattctgagagcgtaggtcttttctttgtttgctttttaaaaatattacatttagatttagttatggattactttagttaattatttttgaagtttcaatctgggattcacatttaacaatctttttttttttttttttgagacagggtcttctgttgcttaggctggagtgcagtggcccattgtagctcactgcagccttgaccaccaggctcaagtgatcctcccacttcagcttcctgagtagctgggagtacaagtgtgtaccaccatgcctggctattattgttattattattttttaattttgtaaagataaggtcttactatgttgcccaggctggtctcaaactccaaggctcaagtgatcctcctgcctctaactcccaaagtgttgggattacaggcatgagccaccatgcctagccagctatactttgttgaatacttctgaggtgcattatgtatatattttaatttttttcatagatgatggtgtccagtatataatttgagaccaggtgcagtgtctaatgcctgtaatccaacaatttggaggctgaggcgggatcgcttgaagccagagtttgagaccagcctgagcagtgtagtgagacctcgtctctacaaaaatttaaaattaattagccaagtgtggtggtgcacacctgtagccccaggtagtcatcaggctgaggcaggaggatcactttagcccaggagttcaaagttgcagtgaactatgattgtgccactgcagtctagcctgagcaacagagtgagacctagtctccaaaaaaaaaaaaaggaaaaacaaacaaacaaaagcaaagtaatatcatatgagccacccatgtaattttagattttctagtagctacattaaaaagtaaaaagaaacaggaaaaatcaattttaataatatttgactcaatatataaaaatattattaagacatcatataaaaattattagtgagatactgtattttacattctttgtactaagcctttgcacttcagtgtatgttttacacttacagtaacagcacaccttgtcttgcactagccagatttcaagacttcaatagcccagcgttcctggaggctacctattgaacagtgcagttctgtaatatattcaagtgtaaatactgttttctgtctgctttcagaaagaatcagaacgagcagatttgaggtgcaagggaaaggatgaagaggcagagctatatgacaggcaatacctatcagtattgtgatggttcataccatttccttcctgggttagttactctactaacaagtgtgggtaactttgtccaggcatttgggcactgtattgtgattttattatttatcagtttttcccattaaaccatgtagttaaggcaagggagtatggttttttgtttgtttgtttttgttttttttttgatacggagtctcgctctgccacccaggctggagtgcaatggtgcgatctcggctcactgcaacctccgcctcccaggttaaagcaattctcctgcctcagcctccagagtagctgggattacaggcatccaccaccatgcctggctaatttttgtgtttttagtagagatggggtttcaccatgttggtcaggttggccttgaactactgacctcatgatccacctgcctcggcctcccaaagtgctgggattacaggcgtgagccaccatgcccagcctgttctttttttttccctttggcaagggagtgtgttcttttttttttgagacggagtctcgctctgtcgcccaggccggactgcggactgcagtagcgcaatctcggctcactgcaagctccgcttcccgggttcacgccattctcctgtctcagcctcccgagtagctgggactacaggcgcccgccaccgtgcccggctaattttttgtatttttagtagagacggggtttcaccttgttagccaggatggtctcgatctcctgacctcatgatccacccgcctcggcctcccaaagtgctgggattacaggcgtgagccaccgcgcccggcctgtgttctttgtttctgctttcataagggtctgtctatgctagtaataaagtagatgctatacttattattagaagtctttctgttgataacagggagctctggcatgattgattatatgtctgggacccgggtgtgttacattacccatattagttatacatgaattcattcccaggcttattctacaaattgggagttggaaaatgtgtacaccatcagtagtaagaccacatgtgaggactctagtgttattaaatactgacacatggtcttgtatttttgcatctttataggttagcttttgccagtagtaataactaacatttgatgaaaatattctgtgtggactattcattttttaccccatttaattttctttgtttttatttttagtttttgagacggagtttcgctcttgttgcccaggctggagtgcaatgccacgatctcggttcattgcaacctctgcctcccaggttcaagtgattctcctgcctcagcctctcccgagtagctggcatcacaggcatgcgccaccacagccagctaattttgtatttttagtagagacgggatttcaccatgttggccaggctggtctcgaatttctgacctcaggtgatccacccgccttggtctcccgaagtgctgggattacaggcgtgagccaccatgcctggcctaccctgtttaattttcacaattctgttgtgactctgcgggtggtgttgacctcattgtatagataatgaaaatgggttttaaatatcttctgttacaaaaggcatttgcatctcatgaatggaatttgtgtgtaaatttagtgtatgtggtgggacgtatttcttttcttagaatctataatagtaacatgatgatgatgatgtattacgtgaaatttatgtttgtgttttaggcagatgtaaagtggcacatctggtttgaaaacctaaaacaattgtattttaaaatattgcatatatatctgagattggtaactgttagagaataaaacaaaaaaaaaacactgcatagtactatataaaaatacactataacatagcaaagcaatgcattcatcagctggcttcacaaacaaaatgtaactaaagtctcttgcatgtaccctccttgatcacttgctcctctctttcaccagagataagtggtatcctgaatttgggattcattagcccaatgtatttctgttatttttatttttgttttttttgagatggagtctcactcggtcgtccaggctggagtgcagtggtgcgatctcagctcactgcaacctccgcctcccgggctcaagtgattctcatgaatcagcgcccgagtagctgggactacaagtgtgcaccaccatgtctgactaatttttgtagttttagtagagatgggggtttcaccatgttggctaggctggtcttaaactcctaacctcatgtgatcctcctgccttggccctccaaagtgttgggattataggtgtgagccaccacacctggccagcccagtgtatttctatatttactatatatgtatagctgagttttctaggtgtctttttatttcagctgaagaagaaattggaattattaaatctcaattttgacatgtgtatattttttcagcctgtaagatattttctgaacttagctccaacattgtatttctggagagttattaagtctcattatgactgagatacaggaatgtgaggtttgaaagagctaatcttagtattaatacccaatattttgagctgttaagattttaatcttataaagggcaggaataagactgtttaaaattattttgctcagtgaagtaaaattctaatgtgagattttattaaatagggtctgctttactatatttaggcgtaagcatagaagcagcaagtgacattgaaatccatggtgtaaatctccgcagtaagtacagttcaacgactgagaacattgtgatgatggtgacctttaagcatctgaattctgatgatacttatttatctataaatgagaatgacaatacttagattattaggataatggggaggactaggggaggactagagtatataaagtgcccggaatcatcctgggtgctgtcttagtgtatcagatatatttcaaaccttagtatttgtggcctttgaatttaaacagttgctgttattagcttcaattgttagagatagtgtcaatgagtggaatatgtcagctagaagctactccttttagattttccacattctgaaaggtaggactatgtttcctttttgatagttgcatcttcactctcctatagggagccagtgggactccaaaccaatagcatagacaacagtcattaagaaagaaggcttaggctgggcgcggtggctcatgcctgtaatcccagcactttgggaggccggggtgggcggatcacgaggtcaggagtttgagaccagcctggccaatatggtgaaaccctgtctttactaaaaaaatacaaaaattagccgggcgtggtggcacacgcctgtagtcccagctactccggaggctgaggcagtagaattgctggaacctgggaggcagaggttgcagtgagctgagatcgtgtcattgcactccagcctgggtgacacagcgagactccgtctcaaaaaaaaaagaaagaaggctttggaaggctttgtgcttgaacccagccctatctgtgaagtgtaatattatttaaatctgctacattgtcatttttgtttaataggatatttttccatttgaaacaaatgtagtaaatgttcataatgaaaaatttggggccgggcatgattgctcacacctataatcccagcacttggggaggccgaggtgggtggatcgcttgagcccaggagttcaagactagcctggacaacatggtgaaatccccatctctactaaaaatacaaaaattagctgggcgtggtggtgcacacctgtaattttagatactcgggaggctgaggcaggagaatctcttgaacctgggaggcggaagttgcagtgagccaagatcatgccactgtactccagactgggtgacagagcaagaccctgtctccaaaagataaaataaaaatttttttaaaaaaggaaaatttggaagttttaaaagctatgaaagctgggcatggtagctcatgcctgtgcttctagcattttgggaggctgagatgagaggattgcttgagcccaggagtttgacaccagcctacacaacatagtgacaccccatctctacaaaaaaataaaaaatatgcttggtgtggtggcatatgcctgtggtcctagctataatacttgggaggctgaggtgggaggatcagttgagcccaagaaatccaggctctggtgagcaccactgcactctagcctgggtgacagagcaagactctgtttcaaaaacaaataaaagctatgaagagacaaaccctaatttcactattcagaaagaaccttttctttttttaattcagcattttttcctaggcttatttaattttctttttgttgctttaattaaagcaacaaaatgctcctccagagcattccaagctatagatggacaagcagtatctgaattaacagggaggatttttttagaatggtgtttagaaaatgataaatttttatttgaatgttaaggaaaatgtttgaatctctcagtttttaaacctcatttcaaggacaaatatcactttggctatgtttattgagttttgaataaaaatatctaacaatatgtttactttgatacggagaacattatttatattaatgatattgatctttctattgccttcatttttgaaaaatatttttcctcatataaaattctgtgttgacaagtatttttctttctttttttgattattaaaaaaattttttttttgagacagtgtctcactgtttcccaggctggagtgcagtagtatgatcatggcttactacagccttgacctcctaggctcaggtgatcctcccacctcagcctcccaagtagcttggactacaggcacacatgaccacacctggcaacgttttctgtttcttgtagagatgggttttgccatgttggctaggctagtctcaaacttctcggctcaagctatcctccagccaaaagtgctgggattacaggtgtgagccaccatgcccagccacactcttttaaagtagtgcaaatgtcattgttttctgactcgtattgcttctcacaaggtctgctgtaattcttacctgtttacttaagtatatgtaattttttgttttcttcttcttgctgccttcatgctgtttgattttgatgtttccaggcttgtgtgtttgttggtttgttttatatttaccttgcttaggatttctctaaacttcttggatctgtggtttggaatttttttttttttttttctggaaaattctaggtcattatctcaagtatttcttttttttagtctcttttttcttctgtgaatccagttatacatatattataccatttgatactttcccacattagtggaacctcttttttttttttcttccctatgttgtagtttgagtaatttctgttgatacatcttaatgtatctttaagttcgttgattttttttttttttttgaggcagaatctcactctgttgcccaggctggagtgtagtggcatgatcttgactcactgcaatctccatctcctgggttcaagtgattcttgtgactcagcctcctgagtagctgggattacaggcgcgcaccagcatgcctggctagtttttgtatttttagtagaaatggggttttgccatgttggccagcctggtcttgaactcctgatctcaggtgatccacccaccttgacctcccaaatcccaaagtgctgggattataggtatgagccaccgtgcctggcccaagttcgttgattctttcatcaattgggcccagtctgctgacattgtattttttatttctagcatttgcatttagcttttgaaattattttccatctaaaaataatttttcttcctgaaattacccatctattcatgtatgttgtctcctttttcactgtcctttaacatactaatcattattacagagaaatcactgtcttcatttttctagcttctgtatcatccctgaatctggttgtatttattgcttttttctcttcactaannnnnnnnnnnnnnnnnnnngacgagggcgggggggggcgccttatggctggcggtaacagcggaatcgttgttgcgggggaatgacggtcgtgattttcggaggtgcggtagcagcccgggagccggtgtaattattgcttttggccgtgcactaaaggggttttttcatagggtggtgctcctaagttttgagtaagcgttgaacattgtatggaagaacagtagagactgagataagtagcatttatgtttggaaatggcacgccacttcttccttcaggcctttaccgtgagatattgggtgcttagttaagctagctactcacgcctgtaatcccagcattttgggaggctgaggcaggtggatcacttgaggtcaggagttcaagaccaccctggccaacatggcaaaaccccatctcaactaaaaaaacacaaaaaaattagctgagtgtggtggtgggcacctttaatcccaaccactcgggagactgaggcaggagaattgcttgaaccccgggggcagaggttgcagtgagccaagattgccccactgcaccctagcctgggcgacagagcgagactttgtctcaaaaaaaaaaaaaaaaaaaaaaaaaaagagatggggtctcctgtgttgcccagtctggtcttcaactcttgggctcatgtgatcctcccgccttgtcctcccaaagtgctggaatcacagccactgcacttggctctagcttgggtttttattgttgttgtcattacctttggtgtaccacaggctttagagtcttaaaatggtagctaatttacccacagtgtagaataccgttgcttggtactaggtgctaggattgtgctaggggctattatcctgatccaccctcatctcagccttatgcggacctggtgtatctggcctcatagatgtggctttgtcagtgttacctcccctcttccatgtagcagccagtttgtcttatatttgtggtagttctcgggttggaatttctcaccccttgcccttgccaatggtagcaaacttctgcttgatggatcagtgtgggatcctaggcccaaaatggtttccatattcttcctcactggaattggggtggggggttgttacttcttcatcctggcaacggtagattttggaaatgtcctgggggagaaaagggtttgctgctttctctacagggacctctgcttcatagcagaaaaggacctgtggaatctcttcaggctttgtgcctgttcctagctgtggaggatctacctcttgcactcctgttccatcagatgggactctctccagtttctgtcatgaagccagtctttcttatgagcaactgtgagagatgtgtaaaggtcttgctcatgtggagatttgtagtgaagaacttgcaagtgaatgtcatacttaccaagtgcattgtgtctgggcattcacttcggaaactgatatgccagtccacacttaactttgaggaatttattaaacttttagcagtttttttttttttgagatagagtttcgctcttgttgcccaggctggagtgcagtggtgcaatctaggcttaccgcaacctctgcctcccaggttcaagtgattctcttgcctcagtctctggagtagctgggattacaggcacccgccaccacgcctggctaatttttttgtatttttagtagagatggggtttcaccatgttggccaggctggtcttgaacgcctgactttgtgatccacccgcctcggcctcccaaaattgtgggattacaggcatgagctaccccgcccggccagattttttgtattacaaccgaccatctctttctctcatggtctgtcctttggaattcagttcattttgttttcttgcaagttcagctccctaatgggctaaagaaaagttacgttttatattatgtggccttttctccttttaaagtgagtgtgatattctctgcagctttctttttcctaagcagaaacagaaatctaatagtaatctttcagattaatctgtgtcaaatttcactgcaagaaacattcaaagttgtaatcattccaagaaggattacaaaaatacttgaaataccaggtgaaaaaactagatttaggaaatcaaggcattgagaaaatattaataagaatagagattaaaaaataactcgagctaggtagagccatgagcattatacagaaatgaaggccaaagaacctggataattgctggatgtgggttggagttatgaatctgagcttcataatgaccaaagcaaagttatataattgacaatgttgaaacttttttttttgtttttgagatggagttttgctcttgtcacccaggctggagtgcgtggcgtatcttggctcactgcaacctccacctcccaggttccagcgattctgctgcctcagcctcctgtgtagctgggattacaggcacccgccactacacctggctaattcttgtattattttttagagacggggtttcaccatgtttgccaggctggtctcaaactcctgatctcaggtgatctgcctgcctcggcctcccaaactgctgggattataggagtgagccaccacacccagccgaaactttttttttttttttgagacggagtcttgctctgtcgcccaggctggagtgcagtggctcgatcttggctcactgcaagctccacctcccaggttcacaccattctcctgcctcagcctcccgagtagctgggactacaggcgcccgccaccacgcccggctaattttttgtattttttttattagagatggggtttcaccgtgttagccaggatggtctcgatctcctgacctcgtgatctgcctgcctcagcttcccaaagtgctgggattacaggcatgagccaccgtgccctgcccactgaaacttttaatttatttccatgagtggattttaactaggaagaaatattttttgctttactggcagatctagtggagtgaattgtgcaatttataagacatctatctttaacatagatactgtttttcttgtgttacattttaaagtgtattgtctgtacttttctcatattttgtgctgggggagctgagataatttcttgaatattagtgccttgtagtacaatgtaagatgctagttataagatagttgttgtttgaatcccagagtcctcaaaacaatcttttattgctaggaagccagaatggccttatgcacaggtagggttaaggaatgcattcatttgttcctttattcaacaaacattaattgcatgtctgctgcgtaccaggtattgcattaagagctgaggatatagcaatgaataaaaacaagtcattttttcacaaaatttatattgtattcagatagaaaggtagtacccagacataattgtcagatggtgataagtgctgtgtagaaaaaataatgcaggccagatgcggtggcccatgcctgtaatcccaacactttgggaggctgaggcaggtggattgcttgagctcagtataattttgagtcctgaaaaaaaatttaaaggaggccaggcatggtagatcacgcctgtaatcccagcactttggggaggattggtgcagcccatggctttgagaacagcttgagcaacatagtgagaccccatatttacagaaaatataaaattagccgggtgtgaggagcttgcctgtagtcccagctactgggtggggtagggcgctgaagtgggaggattgcttgagcctgagaggtcgaagctgtggcgagccatcattttgccactgcactctggcctggcaacaaagtgagaccttttctcaacaacaacaacaaaaacaccaacaataaaaattatagaaataaaaaaatacagtataataactctttatacaacatttacattgtataaataatctagagatgatttgaagtatgcagggaggatatgcataggttatatgcaaatactagatcatttatatcagggaattgagcatctttggattttagtatccacaggactcctggaaccaatctcctgtggatacagagggacaactgtacttcatcaattgacctagatccatctctattaatgtgttctctgatacttgatgcctttatttcccttatcttttttataattgttagtttttttttttaaagggtctgattctgtggtagcccaggttggaggaatgcagtggcatggtcatagatcactgtaacctgaaactcctgggatcaagggatcctcccatgccattctcgggagtagctgtgactacaggcaggtgctaccctgcctagctgtttactttttgtagagatggcggcttgctgtgttgcccaggctgatcttgaactactggcctcaagcaacctacctcggcctcccaaagtaatgggaatgtttccctcgacttgacatgtttgtttaagtctcttaagcttaagaatcaatactttatataaactcaatgtagtattgtggttaagagtatggactctggcctcagaatacataggttcaaatcttagtcttgggtaagtttttgccttttctgtgccagcttttttttttttttaaattttaatttttatatacattcttgagacagggtctcaatctgtcacccaggttggagtgtagtggcatgattatggctcgctgtagcctcgacttcctgggctcaagcaatcctcctgccttagcctcctgtgtagctgggactacaggtatgtgccaccaccacgcctgcctaatttttgtaattgttgtagagacacggttttgccatgttgcccaggctggtctcaaactcctggactcaagtgatcctccctccttggcctcccaaagtgctgggattataggcgtgaggcactgtgcctgttctgtgcctgttttttcatcctgaaataggaataagtaatagaacattcctcctaagtttgttgtaaatgaattaatgtgcatagaacagggtctgtcatacttagtgcctaatagtgtgtgtgtgtgtgtgtgtgtgtgtgtgtatatatatataaaaaaattatatatatttatttatatatatttatttattttcgatacagagtcttgctctattgcccaggctggagtgcaatggcacaatctcggctcactgcagcctctgcctcccaggctcaagcgattctcctgtcttagcctcccaagtagctgggattacaggcacccgccaccatgcctggctaatttttatatttttattagagacagggtttcaccgtgttggccaggctggtctcgaactcctgacctcaggtgatctgcctgccttggtctcccaaagtgctgagattataggcgtgagccactgctcctggcctattgcctaataatattagctattattattgtatggaatatataaccctggaacttctcttttaggggctgttgtcattaagaaagtgagggtactgtttcaaatgtttaaatagagtttaaacattgtttctgagacttccctattttcgtttcccagtaactttatcagaagttgaatatcatttagaattctctcatctttttaaaagcttttctttatatctcatatgctgcatacgtagaacccagatttggtcttttttacacactaacattgtactggatacaaagttattgagaaatcagcagctttaagtgggtatgtaattaaaataaatttcttcccttcaaatttataccattgtggtagctgatactgcctgtttacattttttggtaatgtgagggctgagtcacttttgatgaggaattgtggaacttatttctaaacctggatgtgttgaaacagttaattgaactggaggtgattttagatctccttggtattaaagagggataatcagcactgtggtaacagaaaattatgatggaaatattaattcccctttttgattaataattgagtaaatttttccttagtatttgctttcacaaaaatgaagttctttaacttgactggtttaaaatggttattctcaatcttcttgaaaaaattgtattatttaactgtttaggtatgtactttgttggctgaccaaaataaatgccatttttatgcttcctttaagaaggattgcacagaaaaattaaaaaaccagcacattgggataccaaacactactaggtgggatagtttgagatttcaaaattctgaagaattctcatttcctctaccttatagtcccatgaaggcttctgactattcccagaagtcagtctggccgtcttcttgtttatgtgtcagtgagttatcctcttatagaagcaaaataaagcctaccctttagatttccataataaagtatcagctttgctggctcttcaaggtgtttgaagccagtagtgcccatgtaagaagcaatctcacatctttactgctttactgttggacagtggtttgaatgtgtgccagatgaaggacatttcttgaaagctttgtactacaccttgaattttttttttttctttgagaccgagtctcgctcttgtcacccaggctggagtgcagtagtgcaaccttggcttactgcctccgcctcctgggttcaagcacttctgcctctgcctcccaagtagctcggattacaggcgcccacgaccacagctggctaatttttgtatttttagtagagatggggtttcatcatgttggctaggctggtctggaactcctgacctcaggtgatccacctgcctcggcctcccaaagtgctgggattacaggcgtgagccaccatgcctggcctacaccttgaatttgaggaagagatacgtaacgtttaagatatttgaagaatatcttaaacacagtatcatgtgtttccaactcctaaattgatccctagatagaccatcagaaggctgtgtgtaccatagcaattctgtctcttagaaatgccttccatctaaagcctgctctttgtcaacactggaattacagcactggataaggtttgtgtattttttataggacctatgtggcagaattttacttaatcataatctaggaaggaactctgcagataagtttgttttctgtggtttaaaaagttatccactacaatttgtcttttcctgccactcacttccctttttattttaaccttaatgccagtaaattttaagacaagtttttggcccaaatgctctgatctattaatactttttttttctttctttttttttttttttgagacagtcttgctgtgttgcccaggctggaatgcagtggtgcaatcttggctcactgtaacctttgcctcccaggttcaagcgatatctcgtgcctcagcctcctgtgtagctgggactacaggtgcgtgtcaccaaagccagctaattttttgtatttttagtagagacagggttttgccgtgttggacaggctggtattgaactcctggtctcaagtgatctgctcatctcggcctcccacagtgcttggattacaggcttgagccaccgcatctggcctctgaactttagatattgaaggcatcgcatctttctttttttgatgaactgtttttcccacagtgttatgtcttgtattatttaagcctaccactgtctcagagtcattgtggactagggcagattaagaaaattggagatccttttgtgactagacagatgtcttacaacttttaaatattttgataatttaccattaagaaagaacggcaatgataatggaagacacaagaggaaaagcctggccatcaagctgtatagcagttttccagaggcttttactttttattgggattggattatattaaccttacattcatgttccaaccgtgtaattttgccctaatacattattttaacttttctctagcttctgtagacatcatgattcctgtcttgcttgaatccgaatctgtatagcttgaaacagcattattactagtataagtgcaattacacatcatccatatgtgtaatacaaactggcagactaagaccccagccgatatgttaaatgcattggaaaggagtttttcacacatttaaattgtgttattttcttacatgaaagtgctcgatattattggtttgggctataataattgaatcacagttgaacttgaattcacccaaactgaaaaacatctcgtttgacctgttctgtatcagtgtgctaactgctgaaggtattaaaacactaggtgtgtgaaagcatattaaataaggatatgtttatttaaaaagcatccggtttaaatttgcaactaattttccaatttatgacatgcaaaaaaagtaattctccttttctgtcaccttgtaatttataaaaatcaacagaaaaataagttacatggtttgaattagtcatttagttttttggttttccagtatatgggaggatagaaattatttgacttcttgcttctgtttacatgattttgctctgagtaattacagtttattcttttcgtataaaggagttttcatatcttgaaaattgtccatctgagggtaagcatggtatgaatgtaatgcagtagaaatactacattgagagctcatctaaactctttcaaattcaaatgtgtcattgttttaagcagaattctctctaatcctaatgtttattgtttacatatgcatgaattcattccagagggggaattagaggatggtggctataggctttgttgggactggagctcatgtgacctgggttcagtcttggctgtgactctcaccaggtgtgcgaacctgggaaaaccacctaacctctttgttgcttagcttcctaatctgtaaaatgggcttaataataagcccattacctcataaggtaacctaccttacaggctgttttgaatcttcaaggttggaaggcagtgaaatgtgtataatggccagtgtatacacacgtgttgtagttaagatacattgtaaaggaacctgaaggtttcctctcccatttttgtagattgatggattagttttttttttttttttgagacggagtcttgccctgtcacccaggctggagtgcaatggcatgatcttggctcactgcaacctccgcctcccaggttcaagtgattctcctgccttagcctcccgagtagctgggactacaggtgtgcaccaccacgcctggctgatttttgtatttttagtagagacggggtttcagcatgttggccaggctggtcttgaactcctgacctcatgtgatctgcccgccttggcctcccaaagtgctgggattataggcgtgagccactgtgcccggctaggtggtatttttgataatttaggtcatatattaggttcaatactcagttcgcatatttcttaaaatttaatttgcactcataaattgaggaaatgaaatatacatgtatttattttaaacttttgaaattacactacaaactctgctttttgagtaattttgtgtttgaaataatataggaagtatttacatttattataacatatggaagctctcctttaataataattgtgataccatttgttgaatgtctactaatgtctactaggtgccagggttgttaagaataccattttagactgggtgtggtggctcacacctgtaatcacagcactttgggagactcaggaatttgagaccagcctaggcaacatggtgagacactgtctgtataaaatattaaaaattagctgggcatggtggctcactcctgtagtcccacctacttggaggctgaggtgggaggactgcttgagcccaggaagttgaggctgtagagagtcaggatcatgccactgcattccagcctgggtgacagagtgagaccttgtctcaaaaacaccccaaaaaccattttacaggttaggaaactaaacttgttggtctgacgtcagtttatgctgcatattccttaggaagctagtaaaaagtaaaaaagaaggtaaagttcatactcgtgctcttatactgagatgcgtattaagtaatgtgagttgagattcatattcggtgccatagtcttttttcttaaccccatcaatcaattgggatatgcatatttataactggtatcttggatctattaggacatatttactgaagactatatgtatttgtataatagtatgttagatttttttttttttttttttgagatggagtctcactcactctgttgtccaggctgtagtgatctcggctcgctgcagcctctgcctcctgggttcaagtgattctcctgccttctgctcaagtagctgggattataggcatgcaccaccatgcccaactaatttttctatttttagtagagacgaggtttcaccacattagccaggctggtcagcctcccaaagtgctgggattacagatgtgagccactgcgcctggacatagatttttattagttggtttttttacatcaggacatggagtgctattgttagtttatgatttgacctaattttgcttacaaaggagtgattactcaattggaacagacttaatgatgtgtaattgagaggaaatagaggaaaagaagatggactggattgataaattgttgtaaatttatagattatgtaacttgtcaaaagtgacagcatcatttatctagtatgtatattttaattttctccattgtgcgaaaataaatgctagaaacgatctttgcagatggactattgggccacagtcttaagaatttggtatatttatattccgtgttataactttcaccaacagtcttcatcatatgttttcataattgtgaatgagacccatattttagaaattttatttttatacctatagagctgacattttagataattttagaacaatcacaatgattaattttagaaatagtttttaagagtcgttaaatcgataaatgtgtatgtgtagaaaatttctggaaagatgcttaagaaacttgatagtggttacttttggaagaaaaagattggatgatggaagatactttctaccttacatccttgtatcctagtcctttctcttttatagcctccgtactatataaatgtttttctttaacaataattcagtgatacttaaaaaaagtaatagttaatagcacaagccacctgcagatctataggttatggttatatctatagtttctttgtcctttttcaaattacataatatttactttttgtttgccaaataaagttaacttattctttgtgtatctttttccttttattctcactgaaataccattttctttcactagtcagcatgatttccagaaaatatggtggccctttggggctatattattcatttgcaaatcatgacccgggaaaattaggttgcaaactgtacatgaatttggtattttattctccgtagtcattttataaaggaaatttagctatgttaccttcaataggttactttatttctcaagtcttttttttttccccttttatttagtcagacattcatttcataagattatctcccagggctctttcaaatctctcattctataagcatttcatacccatttcagctcaaaagatggcattcagtagttcttaaagtagtgttataaacaaaatttcttaaactagataggcttcagaataatctttaattattaaaatgcatttatttgcaatctaatttgtcttacaagctaattctaatgtagctcttcataaagtcagccatatacatacttaaaatctcagtcatggagttggatttttaaaagaaaatttccagtaatgcagatatattaacttcatatatatgtatttttaaaagaaaatcaaaatttcttctcttttttttttttttttttttttttaatagagcttggttctcagtatgttgcctaggctggagtgtagtggctattcacaggtatgatcctggtgcacctatagctggaactataggcatgtgccactgtgcccagctctcagcatttctgtttcttttttttttttttttgagatgtagtctcgctctgtcgcccaggctggagtgtggtggcacgatcttgcctcactgcaaccgctgtctcccaagtgcaagtgattctccttcctcagcctcccaagtagctgggattacaggcacccgccaccatacccagctgatttttgtatttttagtagagacggggtttcaccatgttggctaggctggtctcaagctcctgaccttagtgatctgcccgcctccgcctcccaaagtgttgggtttacaggtgtggaccactgcgccgggcccaacatttctatatctaatcttaatactagagaatgagccttttctttgtttggaacctgaaaggaaatgatgctttatgctacctgtagcttcacagataattacacagtgggttatcaaccaaagctaattaaactatgacagtttctttcgttaattgcattttagttggttcagttatggcaatgaggaaaatagttatgatccacaccctgagggtttactattttcaaagtgttgtatactgaaatacggaggtgtctggttatgaacctgtattacttgttcatatgtgaagtgcttagtgagacaatgaactgttaacttcatagagaactgcatttggttatgcggcctttgaaaaatgaacaaaatcatgaaatttcttaataacttttctaatgtcttctcaaataaaaggagtgggattatctttgctggaatccaaattgcaagccaaaagactgtgtcctctgtggatttctcagtgaactagtttgcaggggccaatgtgagataaaaatgcaattcctggaatttggtttaagagtaaattgaaatgtagtataagtagggtacatgagtcctttttttggctggtctgtgttgaacaaagacctagtagctgcatgcttggaaagctttcctgtgttcatgcaatcttcgtccttattgtagccaggcagctgaggagatatcccctaaagaggcgaactccccatcctcccacttctgcttttaatttttttttttttttttttttttttactatatactgggacagtgaaaggccttccattgaccagaattacaaagagtgctttcatgctcagggtttagccatacccagtgtacagggcttttgttagggcttgcactagtcctttctctcttacctccctcagtcttattattcatactttgcagcagcaactgtatcattttgagaattttacttccttatttaaaaataaatagttgcaaaagaaaaattcagttttttataatgaacaatgcaaagcaaagcttttattgtgtttatttggataaagaaaatacactgttatagctgagtgccacactgcagcatttggttttgttgaaattactctttgtcatttaaaaagtacagtcaaaataaacattatttttttgtgtgtgaccgtatctcatctaactcattgttggtgcttgatactcattcatgagatacaagaatcttttaccagtgccaggtgattttgaaaatattaatgtttttatgttagataagatgaaaaggagagtttagacaattatgtggataattcaaaaatgcctttagcctcagttcagattgacatatctccttaagattaatcttgttagtattgtctttgtccttcacctttcttgtatagaagttaaccattaaggtgaaataaaaaagttattatttaatagatattacatttggatatgtagtctttatcagatagagctggactatattttacaattttatttccaatttgcaatacccaagagttctctttcatttttttatgcaagtgattaatcttttaatgaaatgtttaatgcatatggaaaattataaaaataatataacagatacttgtgtgcctgccacccagctttgttgtatttgcttttttttttttttttgagaaggagtctcactctgtcgccctggctggagtgcagtggtgtgatcttggctcactgcaacatccgcctcctgggttcaagcgtttctcctgcctcagcctcctgagtagctgggattacaggtgcacgccaccacgcccagctaatttttgtatttttagtagagacagggtttccactatgtttgtcaggctggtctcgaactcctgaccctgtgatccgcacccccctcagcctcccaaagtgctgggattacaggtgtgagccgccgcgcctggcctgtattttgatattttaaacgagattttggaggattttgttgatcctaatatccgaatctgtgtcttatttatggttattttattttctcatttgtctcaaatttccctcctagacaagtcatttgttaagataaacctagtgagtacccttgattacccttgatgttacatggtttctgctggaaagtatcaaatagaactttcaaaattgtatttaacaatctcaatattaaacaagctgatatactaaatttttagatactaaagcttggttgtcacatattctaagaagggaatataatgtattacacatggtgaaaatttatttcagatatgttatatggactgttgtacaaatacaggattgaagtctgagaaattttctgttattctgtcattaattcagctgctattgaagtattgtacctcattttgacctttattattagacgattgctcttagagctcataatagtagcagtggtttgttgtatgcctacaatatacaaggccctgggtatcctttaaattgtctgggcacagtggctcacacctgtaatcgtagcactttgggaggctgaggcaagaggattggttaaggccaggagttctagaccaacccgggtaacaagatgagactcctgtctctacaaaaaatttaaaaaaaaattagctgggcatggtggtccctacctgtatattcctagatacttgggagactgaggcaggaggaccgtttgagcccaggagttcacgggtgcaataagctgtgatcgtgccattgcatcctgcctgggcaacaaagtgagactctgtttctttaaaaacaacaacaacaacaacaacaaattattctaataaatcgtctcatttaactgtatacagagagctgtatatcagctctctgaagtagtacacattttttttccccttcattttgcaggtgaagaaacaatcttatacagacacatttcactttatttcacctcagtctgttgcacttcacagataacttgtttgtttgtttcctaacaaatttaaggtttgtggcaactgaatgaagcaaagcttttggcatcattttcaacagcatgtgctcacttcatgtctctttataattctttttagtgatctttgatcttactattgtaattgttttgaggtgccatgctcatgtaataaggaaaacctagtaaaaaatactgtgtgctgattgctccactgaaaggccattcccctctctccccatggaccttgctctttcctgagatatattgaaattaggccaataaccctgcagtgtcctctgtgggtcatgtgaaaggaagggttacatgtctcactttacaatagctagaaatgattaagctttgcaaggaacgtgttagccaagttgtgaatgcaaaggaaaagtttttgaaggaaattaaaagggctgctccagtgaacacatgataagattatactaagatattttttgcccttattttgtatacattttcgccaactgtgaaaatgtaaactgtaattgtaaattaaaaaaaggtttttttccgtagagatggggtcttaccatgttgcccaggttggtctagaactcctggccttaagtgttccttttgcctcagcctctcaaaatgctaggattacaggcataagcaaagtgacttgcacaattgatttgctgctggcaccttagcacaaatcaaggttagtggtaccaaaccgagctaataataacgattgagtttttccccaacatgcacattgaaaacaaacaaaatgtcagttttacttttcacttaatatctttgatgaaacagcaaaaaaaattttttttattaagtgttggccttcgaatatacatcttcttaatattctgtgtgataaaatgggaagtacacataaagcagttctgttgcataattgtccaacagtggtcttaatgaataacacttgtgtgagtgagtggcaagccgaaatggcttttttcaagcatcaccattttgaaatgataaactggttatttatgcttggatattttccagataaattatcaaaaatagatgactgtgcttgtgatttcaaggaaaactgttgccagtggtaaaattacagctttcaagggccgggcacggtggctcacgcctgtaatcccagcactttgggaggccgaggcgggtggatcgagaacatcctggccaacatggtgaaaccccgtctctactaaaaatacaaagagtagctgggcatggtggcatgcacctgtagtcccagctactcgggaggctgaggcaggagaatggcttgaacccgggaggcggaggtttcagtgaggcgagatcgcgccactgcactccagcctggcaacagagcgagactcgtctcaaggaaaaaaaaaaaaaagtacagctttcaagtgaaaattagaattttggacagttgtatccaccaccatgaacttgacaactttccaatacttaatagacttttctgatgagatcagtagcgatatgaacagataagatttaaaaaaattgagacagggcctcactgtatcactctggctggagtgtagtgctgtgatcatggctcattgcagcctcaacctcctgggctcaggtattcttgccacttcaacctcccaagtagctgggaatacaggcatgtgccaccacatccagctaattttttgtattttttgaagagacggggttttaccatgttgctcaggatagtctcaaactcttggctcaagggatcctcctgcctcagcctcccaaagtactgggattacaagtcatgagccactttgcctggcccagataagatttttgatactgtacaatgaaatgtgtcaaggaagacctgtataacagtgcaccagtattttccaggtgaccaatgaatgatgttacaaaatcatggacaggtgaaagatatatttaaaatgcagtatagaccagttgattttactgtaacagcacatggaaagttgattcatttggttttagattagaaatttcacctaagttttaaaaactatcactcattgaattttggtgtaattaaaaaaaaagcccaatatttaggaaagagtgttaaaatactcttcttttttcctggtctaagaccaggttttttccacagacttcaaaataacatgtaacagattaaatgcagaagcacatgtaagaattcattcttctgtctgaatccatttgatagaatttaaaaaaaaaatcattcagcctaagaaagcttattaaaaaaagaaaacaagaattcagctggtctaccattaaaccagacatgaaagtgatttgcaaaaaatgtacagtgctactcttctccctgcattaaaaaacattacatagctctttttttttttttttttttttttttttgagatagggcctctatcagccaggccggagtacagtggtgcaatcatagctcactgcagcttcgactcctgggctcaagccattctcagcctcccaaagtgctgggattacaggcatgagccactgcactcagccctttttctaaatatttatatgtttctgatttttaccactcacatttattttaaagtctttataagttggctatctttgagaaatggcatttgatttttcaaaactttttttggtagagttttaaatttggacttacgatactggataagtagtgattagattgtgctgaaatttatggaagaaagtcactttgagtatgccccttctacataagaacatagaatgtgctgaaaagctttctatttgagaatatttttattataacatgctttcctttaggcgttttattttgaaatgaaatgctgctgaatgctataagaaagaaaacatctttgtgggaattgggtatatctagaatgagaaagtaaaatattgcctgtagaatttttatacctcagaaaaaccaaataaagtaacattgacttcacatgggtatccatcttaagaaattatgtttagagttttgatagtttgtaggatttttttttctcagtaagggcattttaattgaatttaggaagtaaattataaatgatgtaaaagtttgtattcttcctgttaatgttataaccaaaagctaaaagataatgtagttcactgttttgcttagtgatcaaaaattttattttgtttattcattgctgttcactggaagacctgctgtcttgggtggctctgagtggggtgagattgacttgtagaatggttttcaactcttactggttgtgaatttacaaatacaggtagtgaggaaaagtttttccagtgtactctgatattattgagaatgatgactacaggatgaaggaagagaattatattttctgagtggtggtagctaatattttatgttactgttgataaccatcagatcattcttctttaaggggaaaaatagacttaattaaaaagtgtaagtggaggcctttggagaagagtcttgctaataaagggggtaatgattttttccataattttccttcatagctggcatggtgagaacaagtatatttaataaactagatctttggcctgtgacaattgggtgaattaatttggctaatgacactagtcatctagatgtaagaaaagcagttttctctctgacccttctgtgaaaaatactttgagcagagaactgttattattctgtagttgataagctgctcaccttgggaatagctgttaaatcagaattaacagctttcatggcagagagacattctttcaggaagtgaataaatgcatgtaaaagttcaccatgcaaagtagcaaaagtcaatcagtatctttcagaattttgtcaaatgtgtagcagattgcattctttttagtttcttttttgtatgtcatgatatgtatatatctatctcacatgctcccacggacctacttttccttgtaataatattttattgtagcttttctaagctctaaagaatgaagttaggagatccgttggtgctcttaattaggaatctgggagagatgtcttaaaggctgtgtcacctggatagtccacggaaaggaaaactcatgatctttatggaagagctatgtataataatgaaatactgcttagtatgtgctaagcccatcataagccttattttgctaattctttccagcaatcccacagagtattgatgaggaaactgaagtttggagcgatcacatcattttcccaaggtaatctagctggcaaacgaatctaggattcaaatttttgtcttttccagcttcaaagtctatgccttcgtagagtgccacttgttagtactcaggaatgtgcaacacattctaaaagcaacagaaattgttcattttgtcctgaaatgtatcctgtgtttacattcagtgacagattaagtttatagcccatgtaattaaattttcattgtctcatttaataagagcctgaaagttccttttctgtacatattttcctgaaagataaattatctaagattagttcaaagtacagtcttagatgaactacttgtattagtgttttatgttcttcatagtttaacagagaaagtcaagtgttttggcatagattggatgcagacattaaggaagaaacaaaagtgtttattagttgcaatggttgaataatacagtatttacaaaaagttactctgggtctgggcgcagtggctcacgcctataatcctagcactttgggacgctgaggtgggtggatgacctgaggtcaggagtttgagaccagcctggccaacatggtgaaaccctgtctctactaaaaatacaaaaaaaaggctgggcgtggtgcctcacacctgtaatcccaagcactttgggaggctgaggtgggtggatcacctgaggtcaggagttcgagaccagtctgaccaatatggtgaaactccatctctactaaaaatacaaaaattaggccaggcgtggtggctcacacctgtaatcctagcactttggaaggccgaggtgggcgaattgcctgagctcaggagttcaagatcaggctgggtaacatggtgaaatcccgtctctactaaaatacaaaaaattagctgggcgtggcgatgtgctcctgtaatcccagctactcagaggctgagacaggagaattacttcaacctgggaggtggaggttgcagtgagccgcgattgcgtcactgcactccagcctaggcaacagagcgagactccgtcttaaaaaaaaaaaaagagaaaacgttactctgaaacctgtgctgaattatagcatttagatgctgaaataagagctccctgtagaatgttggttagatttgaatatgaatttacctgccttgtcatcaaattatccttttaagaaattaaaaaaatatagaagttatccttatgattgtgcacatttatatttcactttactttaaagtttctactttacaatttgttggccgggtgtggcggctcatgcctgtaatcctagcactttgggaggctgaggcaggtggatcacttgaggtcaagagtttgagaccagcctggtcaacatagcgaaacgtttccatctctacccaaaatacaaaaattagctgggtatggtggcatgcacctgtaatcccagctacttgggtggctgaggcgggagaatcgcttgaacctagacgggggaggttgcagtgagccaagatcataccactgcactgcagcctgggtgtcggagtgagattctatcccaaaaataaaaaatttgttacagtctctgttgaaatgggccatacacttcatttcagtgttgtgttagtcctcaaaaattagcaataattcctagaggaactgctacattcagatgcttcctctgttccttacattaaaaattgggaaatacataaattatactgtggccaccaggaaactctggaacaaattaatggcccaagtttttgcaatattgtaggaatttatagactgctagtctttgtcttatttacttatttactttcatttaaatattctttttcttcttgttgttgtttcttttatacttattttaattttacagagacaaagtcttgctaggttgcctgtgctcgtctggaactcctgggctcaagcgatcctcctgcttcagcctcccaaagtgttaggattacaggcatgagccaccatgtccagtcccatttaaatattctattatttgtgttttttgtaagctatctcagatccattgtggaataaagcaagacataaaatagtggaaaaataaacatcatgagcagggctgaaacaaagtaagggtacaaaacccttgtagctttttccttgagacagtcttgctcagttgcccaggctggagtgcggtgctgtgatctcagctcactgcaacctctgtctgccaggttcaagcaattgttgtgcgtcagcctactgagtagctgggattacagatgtgcaccactatgcccagctaatttttgtatttttagtagagatggggtttcttcatgttggccaaactggcctcaaactctttgcctcatgcgatccacccgcctcatcctcccaaaatgctgggatttacaggcattgagccaccacacctggccccttgtagtttttttttttttttttttttttgagatggagtctcactctgtcgcccagtctggagtgcagtggcgcgatctcagctcactgcgacctctgtctcccgggttgaagtgattctcctgcctcagcctcctgagtagctgggattacaggcatgtgtcaccacacccagctaatttttgtattttagtagagacggggttttgccatgttggccagactggtctcgaacacctgagctcaggtaatctgcttgccttggcctcccgaagtgctgggattacaggtgtcagccaccacacctggcctcttgtagttttaaaagataaaacattaatttctttaacatctttaagcatttatattagtccttatatttaagccttcatattcagaaaataatgaaatgaaataccttactaaacttaatagcgtcctacactggaaggatgtaatagagtaaaattgacaacccgttttatcaacattcccctcctttctccattgtctagtaatcttactaatgatgagtgaaaagacaatagaagtagttatacatgtttatatatattacatataaatatgtacagtagtttatatgtaatacagggaattgatttctgaataatagggttgattgtacatctgttttatatacctagcttattttagaccttcctcatggatattacctaagagatggtttcttagcaagtggtcagattttctttgtttattctttcaaagattgtattttttgtttgtttctttgagacagggccttgctatgtgcagtggttagagtgcccaggctggagtgcagtggtgtgatctcaacactgcatcctctgcctcccaggcttaagcgatccttccgcttcaatctcctaagtagctgggactacaggtgtgcgccactgcgcctggctaattttgttattatttgtagagatgagttctccttgtgttgcccaggctggtcttgaattcctgggctcaagcagtcctcctgccttggcctcccaaagttctgggatcgcaggcacaagccaacctggccaaaaaagaattgttataacttgtataagctgggcatggtggcacgtgtctgtagtcccagctactcgggaggctgaagcaggagaattgcttgagtcggggcagttgaggctgcagtgagccatgattgtaccacttcactccagcctgggtgacagcatgagatcctgtttcaaacaagaagaaaaacagaaatcaaataacttgtatgaatagctgtaatgctcacactaatagtatcacttgtttcattaataaaactttatacattggacagacctattaagattatagctaacttgtggagacccctgctctggaacctcagaactcatctcttagccaatacaacttgtgactgtaaatgctaagctatttttaaaaattggatagttttcaggttgggcccggtagctcattcctgtcatcccagcactttgggaagctgaggcgggcagatcacttgaggtcaggagtttgagaccagcctggccaacatggccagtctttactaaaaatacaaaaaaattagctgggcatggtggtacacgcctgtagtcccagtttttaaggaggctgaggcaggagaattgcttgaattaagaggcagaggttgcagcgagccaagatggtgccactgcattccagtctgggtgatagagtaagactccatctcaataagtaaataataaaatcaaaaattggatagttttctaaataaccactatgatagtaacatttattgagctttcctatctgccagacagtgttagatgctctgaatatattatttctgttccaggagagagtttgcattttcccatactttttttgttttaaatgctgaaagaaattttagcaatatattgtatagagtacagtagcccacgtggtgtaaaacttgattctctggttttctgtagggctgataggtaagttgcccttgtcctgatgtgtcaacagtagagtgtaaagtgtgaagagtattttgaatacaatagtcatttctgtgaatggctaccgtaacatctgttggttttcctccaacctcagtggccacttctctgcaagttgctttactaattcctcctttgtcttattgtcaggtgctttaccttcttcctttttttaattttttaattttttttggcattaaatgctatttttatgttcattactttcaaatttgtatctttggatgagagttctagcctgaattgcatattcatatattcactttgtgtatttacatctcctcctggatttttcataggcatttcagaatttttatgctcaaaataaaacttttgatttcctttctacttctatttcaacttgttcctttccagttttggcgagtagtactgctgtctgcctaactactcaagatacactatctgtaaactattcttggttattcctttccttcatgcctcttatgcaatagctattccccttggttttactatctaaactagtccttttctcgccattcatttctgttatcctactgtcttctaggccactaccttttatttggacaactgctataatctctcagctttttttctttcctctcttacccttctcaggtttattttttataaaaaatgaatggtctttaacagtgctattatggatctcctctgtttaaattctcccattgtcgcctgttaaaagaattcatactgcttaccaggccctacaagcctctcagtgatgtagcttctgcttaaatttccaaactctaattgctactctcagcatagctcccttgatcctttaacaaaaaaaaaaaaaaaaagagacagggtcttgctctgtcacttaggctggagtgcagtggcacattcatagctcactgtaaccttgaactccttggctcaggcgacccttctgcctcagcttcctgggtagctaggactacaggcacatgcgaccatgcccagctaattttttatttgtatttttgtagagatgagttcttgacaagttgcccaggctggcctcgaactcctagcctcaaccagtcctcctacattggccttccaaagtgctgggattataggagtgagtctctgtgcccaaccactcttatcatccttgatcacagctgtttcccacctaaaacctgtaccccagatgcctaccttcctggaatgttctttccctttctcttcataggatgggcttatttgtattactcagatttcaattcagaaattacttctactttatctagaatactattaccttcctctcatgtcatttaaaaaagttttcttcataccattttcactattttattttttatgtattttatttaatcttaaaaaaacatattttaggttcaggggtatatatgcaggtttgtttatatagataaattgcatgtcatggtgggggtttggtgtacagattttttttttttcttttttttttaagacggagtttcactcgttgcataggctggagtgcaatggcgcaatcgcggctcactgcaacctccacctcccaggttcaagttattctcctgcctcagccacctgagtagctgggattacaggcttgcgccaccacctatggctaatttttgtattttttgtttttagtagaaatgcggtttcaccacgttggccaggctggtcttgaactcctgacctcagatgatctgcctgccttggcctcccaaagtgctggtattacaggcgtgagccaacgcacctgacctgtacagattattttatcacccaggtaataagcatagtacttgataggtagtttttcaaccctcactctccactcacacttcaccctcaagtagaccttgctgtctattgttcccttctttgtgtcaatgcgtactcaatttttagctcccacttgtgagaacatgcagtatttggttttctgttccttcattagttgtcttaggatgactttcagctccatccatgttgctgcaaaggacatgatctcattttttttttatgggcgtgtagtatttcatggtgtatatataccacattttctttagtctaccattgaagggcatttaggttggttgtatgtctttgctattgtgaatagtgctatgacaaacatacctgtgcatgtgtctttttagtagaacgatttatattcctttgggtatatacccaataatgggattgctgggtcaaatggtttaagttctttgagaaattggtaaactgcttttcacaatggctgaagtaatttacatttccacactagcagtatataagcattccctttgctccgcaacatagtcagcctctgttattttttgactttttaataatggccatcgtgactggtataaggtagtatctcattgtggttttgatttgcatttctctaatgattagttatgtggagcattttttcatatgcttgttggccatgtatatgtcttctttagaaaagtgtttgttcatgttctttgcccactttataatttttcctattttaattgtctcatttgtttactgacttttggtctgtttgctcccaatagaatgtaagtgccacaagttgtttggtttagtactttgtagctactcataaaatatttgttgaggatggatgaatgaagaaggatgttactagtgctttcaagaagacttttaagcatttgtctttctagtaccactttcctgctcatgatcatatcatattacttctagtttgagggccagaaaggggaattaacagattgaatgtcatgtagccggcattgttcagagtatttcatgtagggatttagttaatactcagagcaatttatggctgtttttgctatcaccattttataattgaggagctaatactttgaggttaactatgattacacagtttactaagggataacgttagaaatggaacccaagattgtctgactccaagacccctgcagcatgaaatggtaaggaattctgtggacaaactgctatacgaacacagaattttggtcacttaaaaagggagagatgtttttttttgttctgagacagagtcttgctctgttgcccaggttggagtgcagtggtgtgatcttggctcactgcaaccgctgcctcccaggttcaagcaattctcgtgcctcagcctcccaagtagctgggactacagacacatgccaccacactcggctaatttttgtattttttgtagagatgaggtttcaccatgttagccagactggtcttgaactactggcctcagatgatccacccaccttggcctcccaaagtgctgggattataggcatgagccagtgtgcccagcctggatcttgtttcttcattaatttttcctctttcattcttccactgctgtaagtttatcctcatagtcaccatttacccattcatctccagataaaatgaatcacactcaatattctctagggcattatttataattttattttatttttacagttctcttaaaacaggatttgtagaagttaagtgatatggagtagggaagatttaggattcctttttggttgcctccttgcctccttgctgtgtaaatagtgaacatttggtgtaggggactgggtagatggtaatagtcaagagtatggaagagggacagggaaagtgaatagaaagcagtataggagtagagttcagctgaccagatggactgggttaccagactgcaatttttcagtctgttattatagtacattaaatcaaacaaatcacaccaatgcttatattaaaagcattaaggagctttagtgagacattgtactatgaggagatccatgtgcttttacaaatattatcaatttaaaaaatacatccaaatatttcccccttatagtaactttgtcagaattaaagcataatatagttggtttcaatataaatttttagtactagtaaaggtggtttaataggaaagagaattgaaatggaatatatttgtgatcctgttccttttgctatggatggatacgttaatttttttctcttgacatttgttattttaatttttaagttattacttgaggttatagaataaaattaagaatttgctgccattattactgaattaacatttcactggactattggcatatcagaaattgctttcattattgatgactataaagaatacctggagaggaggaaaaataggaggatggagtggaagagatgacaagagtcaaggtggtgggagggtgtcaaataataaagaaattgttctaattattaagaacctaatcctgagtttaagccatatgtatactgtgtttcaaataataccatcaaatttttattaatgatgattttaagaatgtctctttagcattgtccatttattaacatagcaccataagtgcgtcatggatgaatttaattaatgtttggtaacttaaggtttgtgttatcaggtgtattatataaccatagcatttataatttgaagttggcagtctggtacaaagtgttgggggaaaattgttttattaggtaaaaatcagggtttgcaatctgtggcccactggctggctacctgtttttataaataatttttgtatttttaatggagacggggtttcaccatggtggccaggctggtctcaaactcctgacctcaggtgatcaacccaccttggcctcccaaagtggtgggattacagacatgagccactaagcccagccagaaatacctccatttttaaaactatttcctttttggtgtttgtcttttttcctcagatagcttaccatataaaactgcaacattctttagttgctttctaggcctgagaattcacagcatcttaattgggctttggtgcatgtttcataaatcttctcaagcttatcccattttttaatttgtaatttatgatttcatttataagttttttgtatataacttataactttaacagatggccgagctctcaagtgtgatgaaaagaaaggttttttttgttaccagttatactctgaaggtctgggtgtactttattgtagttccctgcctgtgttgcagaatacaaattatttgattcaagaaagtatttatgatacgttcttggacaatataatgatgtaataaatataataataacataaaggtgaaatttgtagctgtttgatcagtttcactcaaagtggtattgattacattgatttaaagttggaggaatgtctgttggaatgagtccctccctcccaccctcccttccttcctttctttctttgttccttccttactccctccctccctcggtttttttttggttgtttttttttttttcctgagaccctgttgcccaggctagagtgtagtggtgcaatctcggctcactgcaacctctacctcctgggttcgagtgattctaccacttcagcctcctgagtagcttggaattactgatgcccaccaccatgtctggctaacttttgtattttttggtagagacagagttttgccacgttggccaggctggtcttgaactcctgacctcaagtgatctgcccacctcagcctcccaaagtgccgagtttactggcgtgagccaccgtgctcggccctattgcatattttatcctgcagtgatttaaattaagatgaaattcttgaccaagcacggtggctcatgcctgtaatcccagcactttgggaggatgtttttcattgatagttaaccatgatttttcactttgtgaagttatttttaccgttaaactttgatctcttttttatctgaaaatacgtcgacttatttctaggtaccgtaactaaatctctccttaggtatattgacagtcttcatctgatttagtataagcgtgctttgacttgggtttattggctgtggagaaggatcttttcttgatactagtgaagagagaagtttgtcaggagtagtgtcaaaaagcaggttgggtggtttccatcttgtgaagtcattaagcaagatttgaggagtgtggatgatcctatattgcttttttcctgtcattgaaaaagaacgtagtttgccgcccaagcccagctgttttcctgtgtggtgcctgttttactgttactgttgcataacaattctctttgtttgtgtagattcgcaggataagccatactacttctttttttttgtaagagatgggatctgcctggagagcagcctggcataatcatagtgcatttcagccttgaacttcatgggctcaagggatccttctgcctcagactcctgagtagttgggactataggcacgtgaaactgtgcttggcaagccatactttttttaagtctattgaaccggatcatgatgatgaaacattttgagtttatgacttctttctgcaatattctggatcctggggtgagagtggtagaacagataagatgcttgtctcaccatggagttctaatattatttttaaattacatgcaataatatttactttttttggtaacagcattattgagatataattcacacaccataaaattcagccaattaaaatgtacaaatgtacagttaactgtattaaattatacttaatatccagagttgtgcatccatcaccacagttttagaatgtttggtttatctcaaaaagaaacccaggatcctttagcagtcaccctccttcctcccacctctcccttcagcttaggcaaccactaatctactttctgcctctatggatttacctattctggacatttcatataagcagaatcacatgatatacagtctttggtgattggcttctttaacttaccataatgttttcaaggtttatccgtaatgtacatgtatcaccactttctttttattgccaaataaaattccattgtattgatatgccacaatttgtccatctaacagttgatggacatttatctccacttttttgctattatatataatgctgatgtgaacatttgtgtacaagttttacatggacatgctttttatttttctgttgaatacgtgcctaggagtgaaattactgaaccatatggtgactctattgcttaaccttttgaggaactgactattcatttattttggatatatagtttctaagttctgaaaaatgaatggtttttgtaacctactgtgtagaagacacagaaaacttccatttaccctgttatattccttcaatgatgtccctttgtggataaactctgcccccaacctctaggccctggcaagcactgatctgctttccatttctacatttttgtcttaactagtatattatataaatggacttacagtctttttgagtctagcactccctcagggacagggtctcactctgttgcccaggcaggagtgcagtgagtctagcttcttttacttaaaataattagcatttgagattcattcatgtctttgtgtttattaatagttaattccttttaaatgcctactagtattccattatatggatgtaccatagtttgtctattggccagttgaagatatttgactcatttctagtgtttttggccattatgaatgaaactgctgcaagcatttgtgttcagggttttgtgtaaatttaagttgtcatttatgttgggtaatacctatgagtgggactgctgagtcatatggttagtgtatgtttaattttataagaaactgccaaactgctttccaaagtgactataccattttgcactctaccaacgtgtgagatttccagttgctcctcatccttatcagcactcattattgtcatttttttatggtttcagttagtgtaacaggtatagtgatatctcgttttggttttaatttgcattcattaatgatgtttcattaaggaagtaaagagccttttgtgtctttatttgtgacgtgtatattttctttgattaggtgtcattcatttaaaacttttccccatttgaggctaggcacagtgggtcgtgcctataatcccagcactttggaaggctaaggcaggagcattgcttgaactcaggagtttgggaccagcctgggcaacatagcgagacttcatctttacaaaaaatgaaaaaattagctgggcatggtggcacataccagttacaggttgagctgggaaggttgcttaagcctgggagatcaaggctgcagtgagccatgatcctgcaactgcactccagtgtggggcaacagagcaagaccctgtctctcaaaacagcaaccacagcaaacttttgcccatttgaaaaatattaggttgtttgttgtcttgttattgagtgtttagtttctttcttcttcttcttcttcttcttttttttttttttttttttcgagacagggcctcgctctggttgcccaggctggagtactgtggcgtgatctctgctcactgcagtctccacctcctgagctcaggtgattctcccacctcaacctcccaagttgttgggattacaggctctaacatgcctgcctaattttttgtgtttttagtagagatgcagtttcaccatcttgcccaggctagtcctgaactcctggactcaagcagttcacccacctcagcctcctaaagtgttgggattatgggcatgacccattgggcccagcctagtttcttcatgtatcctagatacaaatcctttatcttatttacgtaagttttaaaagtatttaccacagtctgtatcctgtctctttgttcttataacaatgtctttcacagtggaaatgtttgtagttttgatgatgttcagtttatcaattttcttctttttaaaaaatattttgtagagacaaggccttgcttgctatgttgcccaagctggtctcaaattcctggactcaagtgatcctcccacctcgtcctcccaaagtgctttgattacaggcatgagccactgtgcctggtcatatcaatttttttttttaaatacatcatgcttttgatgtgttatctaggaactcttggcctaatccaagataacagttgtttcctcttattgtttcttctaaaagattcatagttttctgttttacactagatccacacattttgaattaatttttgtacaaagggtgaggtgttggtagagagtgtcattggtttgcatatggtttttcagttgtttcagcaccatttgttgaaaagactatttctccacttaattgcctttgcacctttgtgaaaaatcgattcactacatttgtgtgggccttcttacaggttgaatattctgttcattgatttgtttttatgtccttttgccagtaccacactattttggttttcaagtgttaattttaaggttggaatgttttgtctaatgcccccttccttttggtttttcaaagttaaaaacttcatttttcctatcataaaaaacagacattttattttacctgaggtgacatatagcaatacctcaaattcatgagttactcctttcttcctatctggattgtgaacaacagtttgagatactgaggtagaggatatgtcaagttgaagatgctgtggatgactgcgtgtcctttttcctagggatacctactgaaagtggttgcattgtgtacaagtctgatcattagctgcatcatcttagcacacagcaccttttttcgatgaaaagagtctcactccttttactccagaaaggaaatacaaaattggaaagatcgtgtatccttgatagaatctgcacactatttgtacagaatagtaaagccaaacttagaagaatctcctctgactattccatagtcatggttcttttatctatttattttaaaagtttattttttgtggtaaagtatacataacacaatatttaccattttaatcatttttcggtgtacagttctgtggcattaagtaaattcacatcatgcagtcataaccaccattcatgttcaagattaatcatgattattttttaacctaagttccatcactgaaacttctagcacattaaagttacattcactttttgaaattacattttaacaatgctctagcatttcaggtcaatcaaggccttaacatttttgtaaatcttatagttatacccataaaaactttcagccagtagtataacttccagcaaactttgactttcgtcatatgtgagtagcattcagttagtctttaaaagatagctttttaaagtctgccaaatgtatgtagctcacctattattatccccatctatgtccagaggaatttggcatatcagcatgttttattttggttattatcaaggccatttgagtggttcagatgtaggacccaactggaattgttaacttcaacttgtttttgttactgatatttcttcacagtgggcaattaaatttatgggggacaagtgtaattttgttcaatggatatactgctgtagtggtgaagtcagggttttcaatgtgtccatcacttgaaaaacatatgttgtacccattaagtaatttctcatcatccccctactccttgtgagtctttgttttctgacattccacactctacctccatgtgtatacattatttaaatctcaacagtaagtgagaacatgtgatatttgtctttctgagttgtttcacataagatcatggcttccagttccatctatgttgctgcaaaagaatgacctcatttttttatggttgaatagtattccattgtgtatatatactacatcttctttatgcagtcatcttctgatggacacttaggttgattccatatttttgctattgtgcaaggtgggcatttttgaggagagaggcttactttgttgccttctgcctttgctttgccatatggattgattgtatttgaatctgaattgggcattagaaaacactgttaaagcatattagtctgttgtagaactaaaaatgtgagggcattagaaacttcatttgaaacttttgtgagtgtatcattcatttttgcatatgaatatcattttgtctcacagaaaatgtgtatgtgtatttttatcttgtgtagaaataacagcgtagtcagcagccattgttgcatagtctctggcaatattgttttgttttttttttgtttgtatgtttctaaacttacaggatatgtttctgggtaaacttaaaaatgactagcaggaaatcaattggcaatatgtgctgacttgtatctgagttaatagaaaatcagagccagaacaaggggttttctggctaagctctttgagactaatgtttctggatttgttaaaaatctaatataggtcaggtgtagtggctcatgcctgtaatcccggcactttgggaggctgaggcaagaggattgcttgagcccaggagtttgagactagcctgggcaatatagggagacaccatctctaccaaaaaatttaaagattagctgggcacgatggtacacacctgtagtcccagctactctggtgagtgaggtgagatcacttgagcccagaaggttgaggctgcagtcagctgtgaacccaacactatactccaaaacaaaacaaaatctaatataatggtttctagttgtgtacgttccagagatactaattgcaaagattcaatgataaagaatagtatagtcttgcaattctaaaattccaagagcttggaaaacttattctttttcttgcattggtaaatttctggacagaagggtagaagtttgaatattcatatattttgctgtagagatattaatgtgtttgattaagggtgctgcctagattctgctaggcgtgttaagtaatatacataaccactgtatttgctttccaatagggtttttggacctgaattaacagccagcattaaattgagttgaaacagagtttaaaattggttagttttatttccctagatctcaatggtaaaaggtaaggagagcaaaggaagaattgcccaggtgaatatttgggctcgagggatcctgtcatcacagctttcttagtggctggaactacaggtatgcaccactgtgccaggctcttttttaaaataggttattttttcttttgtaggggctatttacaaaaagaaatcctggcttttattattattattattattattattattattattattattattatactttaagttctagggtacatgtgcacaacgtgcaggtttgttacatatgtatacatgtgccatgttggtgtgctgcacccattaactcgtcgtttacattaggtatatctcctaatgctgtccctcccccctccccccacctcacgacaggccccggtgtgtgatgttccctttcctgtgtcgaagtgttctcattgttcagttcccacctatgagtgagaacatgtggtgtttggttttctgtctttgcgatagtttcctgagaatgatggtttccgtcttcatccatgtccctacaaaggacatgaactcatccttttttatggctgcatagtattccatggtgtatattatgtgccacattttcttaatccagtctatcattgatgggcatttgggttggttccaagtctttgctgttgtgaattgtgccgcaataaacgtatgtgtgcatgtgtctttatagcagcatgatttataatcctttgggtatatgcccagtaatggagtggctgggtcaaatggtatttctagttctagatccttgaggaatcgccacactgtcttccacaatggttgaactagtttacagtcccaccaacagtgtaaaagtgttcctaaggaaatcctggctttttttaaaaaaaaaaaaaaattttttttattatactttaagttttagggtacatgtgcacaacgtgcaggtttgttacatgtgtacatgcgccatgttggtgtgctgcacccattaactcgtcatttacattaggtatgtctcctaatgctatccctccctccttcccccaccccatgacaggccctggtgtgtgatgttccccttcctgtgtccaagtgttctcactgttcaattcccacctatgagtgagaacatgtggtgtttggttttttgtccttgtgatagtttgctgagaatgatggtttccagcttcatccatgtccctacaaaggacatgaactcatccttttttatggctgcatagtattccatggtgtatattatgtgccacattttcttaatccagtctgtcattgatggacatttggattggtttgaagtctttcctgttgtgaattgtgccacagtaaacatacatgtgcatgtgtctttatagcagcatgatttataatcctttgggtatatacccagtaatgggatgcctgggtcaaatggtatttgtagttctagatccttgaggaatcaccacactgtcttccacaatgtttgaactagtttaccgtcccaccaacagtgtaaaagtgttcctatttctccacatcctctccagcacctgttatttcctgactttttaatgatcgccattctaactggtgtgagataatatctcattgtggttttgatttgcatttctctgatggccagtgatgatgagcattttttcatgtgtctgttggctgcaaaaatgtcttcttttgagaagtgtctgttcatatcctttgcccactttgtgatggggttgtttgtttttttcttgtaaatttgtttgagttctttgtagattctggatattagccctttgtcagatgagtagattgcaaaatttttcttccattctgtaggttgcctgttcactctgatggtagtttcttttgctgtacagaagctctttagtttaattagatcccatttgtcaattttgtcttttgttgccattgcttttggtgttttagacgtgaagtccttgcccatgcctgtgtcctgaatggtattgcctaggttttcttctagggtttttatggttttagatctaacatttaagtctttaatccatcttgaattaatttttgtgtaaggtgtaaggaagggatccagtttcagctttctacatatggctagccagttttcccagcaccgtttattaaatagggaatcttttccccatttcttgtttttgtcaggtttgtcaaagatcagatggttgtagatgtgtggtattatttctgagggctctgttctgttctgttggtctatatctctgttttggtaccagtaccatgctgttttggttactatagccttgtagtatagtttgaagtcaggtagtgtgatgcctccagctttgttcttctggcttaggattgtattggcagtgcgggcccttttttggttccagatgaactttaaagtagttttttccaattctgtgaagaaagttattggtagcctgatggggatggcaatgaatctataaattaccttgggcagtatggccattttcatgatattgattttatgaggccagcatcatcctgataccaaagcctgacaacaacaaaaaaagagaattttagaccaatatccctgatgaatattgatcctcaataaaatactggcaaaccgaatccagcagcacatcaaaaagcttatccacagtgaccaagtgggcttcgtcactgggatgcaaggctggatcaacatacacaaatcaataaatgtaatccagcatgtaaacagaaccaaagacaaaaacacatgattatctcaatagatgcagaaaaggcctttgacaaaattcaacagcccttcatgctaaaaactctcaataaattaggtattgatgggacgtatctcaaaataataagagctatttatgacaaacccacagccaatatcatactgaatgggcaaaaactggaagcattccctttgaaaactggcgcaagacagggatgcccctctctcaccactcctattcaacatagtgttggaagttggccagggcaatcaggcaggagaaagaaataaagggtattcaattaggaaaagaggaagtcaaattgtccctgtttgcagatgacgtgattgtatatttagaaaaccccatcgtctcagcccaaaatctccttaaactaataagcaacttcagcaaagtctcaggatacaaaatcaatgtgcaaaaatcacaagcattcttatataccaatgacagacaaacagagagccaaatcatgagtaaactcccattcactattgcttcaaagggaataaaatacctaggaatccaacttacaagggatatgaaggacctcttcaaggagaactacaaactactgctcaacgaaataaaagaggacacaaacaaatggaagaacattccatgctcatagataggaagaatcaatatcgtggaaaaaaaatttttttttaatagaggcagggtctcttgtggtctaggctggagctggcttgtttaaattgcatttttttaatttttgaaaaacatattcgtgtggttcagaagtaatgttaaaagactgtagctatggtcaggtgcggtggcttatgcctgtaatcctagcactttgggaggccgaggtgggtggattgcctgagctcaggagttcgagaccagcctgggcaacattgcaaagccccatctctactaaaaatacaaaaaattagccggctgtggtagcgcatgtctatagtcccagctgcttgggaggctgagtcacaggaggctgagtcacgagaattgcttgaacctggaaggcagaggttgcagtgagctgagattatgccactgaactccagcctgggtgacagagcgagactctgtctcaaaaaataaaaaattaaaaaaagaagactatagctgtttccaaagtaactgtattttaaacagtacatgttttgagaaatcctgttcggtatctttgtgaaatagggtatagtttagaaattctgccattactttatgtattatagaagttaacttccttttttatttcagaactatgtagaaataagaagtagagaaagcataaattgacattgacatcttggcctaaataagaaataatatagaaaaagaccctttgcattatttttttatctcctgatattagttgcctattttacctataaatcagtatttatttgatgacatttgtatccttgatcttcctttcaatgaggaaatgataacttgagtctttcactttaagaatattgcttatgctgaacattagagcagtagtttttcttgtagtggagtggggcaaggtttaggaacgttcagctgggaattataaatggaacattagtgttttggcagactgaaagacaatttctgtttattttcacttcttcttttctactttgtgcaaatccaccttttaaggaggtactgactgtaaacaaccccagtgccagacatgattaccattgatcaagaaggtttattttgaagagagttcatccttcatgaagtttcataaacatttgttctttaaaatgtattggtcctctcttttctgcataagtaggaaacattcatatcagtaatacatgtcatgtaatatcctcatggattcttggatttctctgatgaaatttagtctttgcaagtgtatttgcctagttggcatttgttgtagcatgtatgtagtgagtactttaataatcagagtctttaaccatcaaattatatttatttctgaaatttgtcttttgttattattctactagaaaaaagaaagaggagaattcgaaattttttacatttatatttctacttagagtcttaattcagtattgcataccatctatgtaatcttactaatagttttgcttgtacttcctaatgatataaatcacagcaatttgaaatacagaaatatcaagtggatgtactactgtatttcaatcatgggttatgaaaaatcagcatgttctggattattgtatgtgcatgttacactgctcatttattgaattagaattttaagtagcactatgaaaagctgttttgcctgtatcttgagctcagagggaaagaaacatccaatgatttatgcttggagatacagagtttggtgagaactggtaataagcacaatggcaggcagaattaggaaggaagtatgttgtagtgtacagagttttacatgggtcatttctttgaattcaaattctgtagaaaatttctggcagttcctgtctcatgctgatttatttaggcttttttttttttttggtagagaggtttgctaattgcaacttgttaaactcctgtgctcaagtgatcctaccacctcagcctcccggagactacaggtgctggcaaccacactcggctaatttagtagagatgaggtcttgctgtgttgcccaggcttgtcttgaactcttggggtttaagtgattctctcagtttgacctccaaaagtgttgggattataggcttgagccactgtgcccagccagttatttttagtacaaagtaaaggtggcagagtctcatcatgggtctaaagtttggacacttattgtatagttgtgtttgttttgagattccatggaatgtttatcatgggaaggcttttgaagagattgatttagtcattttaggacatttgaaacatttggtttttagttttagtggagaagtatataactcactaattgggtgaaaatgcttaggtcgttggtggaattttgtggttgcaattttctctaactattaagcatccatttttgaattctcttatccttaactcgctcttctagaattcctagaggacctgtgcaacaacctcttgaggatcgaatcttcactcccgctgtctcagcagtctacagcacggtgagtgtctgaaggttgtcaaattgtgtgtgtgcttttgtgtgtgaatccttggtattaattataggcagtgtttgtttgattgacacatgacaaatttttggcaaaaagttcaataaaattctgaatagaatgataggccctttccatatcatcttaatctaagaaatggagtgaaacaaatactgtgttaagatagagagacctgtcttatttttcctttctgtaaatattcacctctggccttattattattattatttttattattttgagacagagtttcactgtgtcacccaggctggagtgcagtggtgtgatcttggctcattgcaacctccgcctcctgggttcaagcaattctccctcctcagcctcctgagtagctgggactacaggcacgtgccaccacacctggctaattcttgcatttttagtacagatggggtttcaccgtggtggccaggctggtctcaaactcctgactgcgggtgatccacctgccttggcctcccaacgtgctgggattataggcagctttgtattctttttggactcttgagttttattttctttctggattttttttcttaaaaattttatcagttttacattttctaaactttaaattttttaagttttactttttattctccttgattacatattttcaaaatgctgaaagtttagaagagtgaacactttttttttaaattttgagatggagttttgctcttgttgccaggctggaatgtaacggtgtgatctcagctcactgcaacctctgccttcccagttcaagtgattctactgcctcagcctcccaagtagctgggattataggcgtgtgccaccatgccctgctaattttgttcttttagtagagacagagtttcaccatgttggttggtctcgaactcctgacctcaagtgatccaccacctcagcccctcaaagtgctgggattacaggcctgagccactgtgcctggccatgaacactgtttttaaccagaaggaaatttaattttttttcatttttaagagatcgggtctcactctgtcacccaggcaggagtgcagtggcatgattatggattactgcagccttgaactcctggcctcaagttatcctcctgcctcagcctcccaagtaactgggactacagtcacatgctactgtgcatgctaattaaaaaatttttttggctgggcacggtggctcatgcctgtaatcccagcactttgggaggccgaggcaggtggatcacgaggtcaggagatcgagaccatcctggctaacacagtgaaaccccgtctctactaaaaatagaaaaaattagccggacatggtggcgggcgcctgtagtcccagctactcaggaggctgaggcaggagaatggcgtgaacccaggaggcggagcttgcagtgagctgagatcgtgccactgcactccagcctgggcgacagagcgagactccgtctcaaaaaaaaaaaaattttttttggtagaggcaaggttttatgatgttgctcaggttggtcagactcccgagctcaagcagtcctcctgcctccacctcccaaagtgctgggattatagacatgagccattatgcccagcccatttaattttttatattagatgattcaaattcataaatgaagggaaaataattattttgaggattcttacttggttgagcaggctggtttcaaattcctgggctcaagtgatccacccaccttggcctacgaaagtgctgggattacaggcgtgagccaccatgcccagccatatgaaagaaaatttaaaagaggatgaagctaataatattagaagtaaattttaggtgttttacagtgaacctaaggtaatttaggggaattagggagtgaaacctatcttttaaatatttcggttcaacataccatttattcctgtggatatagataggataccttaaaaggactcatagtctactgagggagataagaaaataaataattctaatataaagtgatatgatagagaagtgattcctattattttgggttgtgaatcacttttagaatctgaaaatagttgtaatgctctctctttcaagaggcacatatacatagtgtttacatataatttcagagtttcccagatgtccatcaggccatttctttttttctttttttttttttttgagaaggaatctcactctgttgcccaggctggagtgccgtggctcgatcttggctcactacaacctctgcctcctggttcaagtgattctcctgcctcagcctcctgagtagctgggattacaggtgcacatcaccacacctggctaatttttgtatttttagtaaagatggggtttcaccatattggccaggctggtctcgaactcctgacctcaagtgatccgcccaccttgaccttccaatatgctgggattacaggtgtgagacactgcgccccacctcatcaggccatttctaagctccagattaagaacctttgattagagacaggaacgtgttaattgcatgcgaaaggaagaggtgacttcattgagaaagtgacacttaaagcagaagatgcaagacttctgtaggtagagaagagaaggcaaagccttctaggaagtgaagatccagaggcgtggttaatggaatggccagtagacagttcactatgacataatatgaagtgaaataaagagtatgtaggttggttgggggggttttaagctgatctttgtatatttgcaaattaaccaggcatggtggcatgtgcctgtagtcccatgtactttggaggctgaggcaagaggatcacttgaggccaggagttaaaggctgcagtaagctttgatcaaacctctatgctccaacctgggtgacagagtgagaccctcaaaaaaaaaaaaaaaaaaaaaaagagtatcatgtaggtaatggatatttttcttggtctgtctgaaggctcagtaacacctattgtagatcaattaattatttctgcagccccattcactcttagaattgacccagtttctgttataaattatctggtcaccctaatcattaggaaccttcagttcattgaaaaataacattttgaataacactttgaaaaataacctttgggccaggcgcgatggcttactcctgtaatcccagcactttgggagaccaaggcagacggatcacgaggtcaggagattgagaccatcctggccaacatggtgaaaccccatctctactaaaaatacaaaaattagccgggtgtggtggcgtgaacctgtagtcccagctattcgggagactgaggcaggagaattgcttaaatccaggaggcagaggttgcagtgagccaagatcgcgccactccagcctggcgccagagtgagactgtctcaaaagaaaagaaaaataacctttggctgattgtgctgtctcctacctgtaatctcagcacttggggaggccaaggcgggaagattgcttgaacccagtagtttgataccagcctgtgcaacataatgagaccccatctcaacaaaaaataaactagccaggcatggtggtgcgagcctgtaattttaggtagttgggagaccgaggcaggagaatcacttgagcccaggaggtcgaggctgcagtgtgatacatgattgcgcctctgaattccagcctggacagtagagcaaaatcctgtgtcttaagaaaaaagaaaacttaaaatatttttttctggcacaacctttctctaggtcttagttttttatagttttttcaaaaagtactatgcaaaagaacagcatcattgtcagaatccctcttaaaatacgataatgttttctaattacctaagtatactttcaccatttaattattatttttaaattaagataagtaaaaatgaaaacttctagtaatcctgagtgatttatggaggcaaatactataaccatttttggagtgtagcttgtctttcttgtcttttttttagaccctatgctttattctgtccctttatctcgtatcagctttttgtatgccattccttagataacatttcttaaataataaatggttatatattgtttattataaaagaatttaatcactcagcattgaatacttaagcttaagcttttactgtgtgtcatgcagtggtctaggtgttcaggatatggtaatggagcaacacagaccctcagccctcatggatattacatctttatgggataagaagacagcaaacaaatatatatacagtatactattgggttttagtaagtaacttgatgagaataaagcaggataaagggatagagaatgactggccattctaccttaactaattctctcagggaaagtctctctgaaaaggtggcaattaagctgaaactgaagatttctaggaaaaaaaaaacatttgtggtagaaggaacatcagtgcagaggcccagagataggagtgagctcaatgtagtcttagaaatggaagaaagccagtgtggctggaatggagggaggttggatttgagacatcagattatgtggactggtatggtttggctttgtgtccttacttaaatctcatgtcgaattgtaatccccaacaagtcaggggagggacctggtgggaggtgattggatcatgggggcagattttccccatgctgttcttgtgatagtgaatgatttttcatgagatctgatggttcaaaggtgtggcacttctccccttgctctctctctctctcctgccatcatgtaagacgtgccttgcttcctcttcgttttctaccattattgtaagtttcttggggcttccccagccacgtggaactgtgagtcagttaaacctcttttttttctttcttttttttttttttttaaattacacagtctcaggtagttctatagcagtgtgagaatggactaatacatggacattacagaccatagtaaagattttggattttaatctagatataatagaaagccagtggaggattaagaggagtaggtgtgaatttacttttaaaaggtcactgtggctgctgtatggagaatagactgtgtgatgtggacatgtggtggtgattgaaatgggagtaaggagaagtaaagtcagtagaatatgttgatgtcttggatgtgggatgtgagagaaaagagtaaaggtggtgtcgtagatcttggtttgggcaactgagtggtcctatttgtggagatgaatactgaatgaggaacgagtattttgttgaaaaaacctgagttataaaacctcataaatgaggacatgtaattctgtaattttattactttggagaatagatcatccaaatcctgtgagcaacagcacactgcctgtcatgcagtttacaggaaatatttgaatctaagcttttgaatgtatttttttagtttgatctaatttgatttttactatttaaaactactgtcatatttgtagtcctttgatcagttttaaaaaatcgagaccaggcatggtggctcaaacgtgtaatcccagcactttgggaggctgaggtgggtggatcacttgagctcaggagtttgaaaccagtctgggcaacatggtgaaaccctgtctctattagaaaaaaaaaaaaaagtgtgtgtgtggctgggtgtggtggctgacgcctgtaatcctagcactttggcatgccaaggagggaggactgctcgagcccaggaacttgagaccagcctgggcgacagagtgaaaccgttgtctccaaaaaaaaaatgtgtttgtgtatatattatgttttatgcctattctggaagaaaggtttttaggcagctaaaagttaccttaaagtgtgatagtctccactttttatttatttatttatttaacagagtctcactctgtcgtctaggtcagagagtagtggcataattacagctcatcgaagccttgaactcctgagttcaagtgaacctcctacatcagcttcctaaatagctgagtaactaggattacaggcacaagccaccgtgcccagctaattttttaaacttttttttttttttttttttttgagacagagtctcgctgtgtctnnnnnnnnnnnnnnnnnnnnnnnnnnnnnnnnnnnnnnnnnnnnnnnnnnnnnnnnnnnnnnnnnnnnnnnnnnnnnnnnnnnnnnnnnnnnnnnnnnnnnnnnnnnnnnnnnnnnnnnnnnnnnnnnnnnnnnnnnnnnnnnnnnnnnnnnnnnnnnnnnnnnnnnnnnnnnnnnnnnnnnnnnnnnnnnnnnnnnnnnnnnnnnnnnnnnnnnnnnnnnnnnnnnnnnnnnnnnnnnnnnnnnnnnnnnnnnnnnnnnnnnnnnnnnnnnnnnnnnnnnnnnnnnnnnnnnnnnnnnnnnnnnnnnnnnnnnnnnnnnnnnnnnnnnnnnnnnnnnnnnnnnnnnnnnnnnnnnnnnnnnnnnnnnnnnnnnnnnnnnnnnnnnnnnnnnnnnnnnnnnnnnnnnnnnnnnnnnnnnnnnnnnnnnnnnnnnnnnnnnnnnnnnnnnnnnnnnnnnnnnnnnnnnnnnnnnnnnnnnnnnnnnnnnnnnnnnnnnnnnnnnnnnnnnnnnnnnnnnnnnnnnnnnnnnnnnnnnnnnnnnnnnnnnnnnnnnnnnnnnnnnnnnnnnnnnnnnnnnnnnnnnnnnnnnnnnnnnnnnnnnnnnnnnnnnnnnnnnnnnnnnnnnnnnnnnnnnnnnnnnnnnnnnnnnnnnnnnnnnnnnnnnnnnnnnnnnnnnnnnnnnnnnnnnnnnnnnnnnnnnnnnnnnnnnnnnnnnnnnnnnnnnnnnnnnnnnnnnnnnnnnnnnnnnnnnnnnnnnnnnnnnnnnnnnnnnnnnnnnnnnnnnnnnnnnnnnnnnnnnnnnnnnnnnnnnnnnnnnnnnnnnnnnnnnnnnnnnnnnnnnnnnnnnnnnnnnnnnnnnnnnnnnnnnnnnnnnnnnnnnnnnnnnnnnnnnnnnnnnnnnnnnnnnnnnnnnnnnnnnnnnnnnnnnnnnnnnnnnnnnnnnnnnnnnnnnnnnnnnnnnnnnnnnnnnnnnnnnnnnnnnnnnnnnnnnnnnnnnnnnnnnnnnnnnnnnnnnnnnnnnnnnnnnnnnnnnnnnnnnnnnnnnnnnnnnnnnnnnnnnnnnnnnnnnnnnnnnnnnnnnnnnnnnnnnnnnnnnnnnnnnnnnnnnnnnnnnnnnnnnnnnnnnnnnnnnnnnnnnnnnnnnnnnnnnnnnnnnnnnnnnnnnnnnnnnnnnnnnnnnnnnnnnnnnnnnnnnnnnnnnnnnnnnnnnnnnnnnnnnnnnnnnnnnnnnnnnnnnnnnnnnnnnnnnnnnnnnnnnnnnnnnnnnnnnnnnnnnnnnnnnnnnnnnnnnnnnnnnnnnnnnnnnnnnnnnnnnnnnnnnnnnnnnnnnnnnnnnnnnnnnnnnnnnnnnnnnnnnnnnnnnnnnnnnnnnnnnnnnnnnnnnnnnnnnnnnnnnnnnnnnnnnnnnnnnnnnnnnnnnnnnnnnnnnnnnnnnnnnnnnnnnnnnnnnnnnnnnnnnnnnnnnnnnnnnnnnnnnnnnnnnnnnnnnnnnnnnnnnnnnnnnnnnnnnnnnnnnnnnnnnnnnnnnnnnnnnnnnnnnnnnnnnnnnnnnnnnnnnnnnnnnnnnnnnnnnnnnnnnnnnnnnnnnnnnnnnnnnnnnnnnnnnnnnnnnnnnnnnnnnnnnnnnnnnnnnnnnnnnnnnnnnnnnnnnnnnnnnnnnnnnnnnnnnnnnnnnnnnnnnnnnnnnnnnnnnnnnnnnnnnnnnnnnnnnnnnnnnnnnnnnnnnnnnnnnnnnnnnnnnnnnnnnnnnnnnnnnnnnnnnnnnnnnnnnnnnnnnnnnnnnnnnnnnnnnnnnnnnnnnnnnnnnnnnnnnnnnnnnnnnnnnnnnnnnnnnnnnnnnnnnnnnnnnnnnnnnnnnnnnnnnnnnnnnnnnnnnnnnnnnnnnnnnnnnnnnnnnnnnnnnnnnnnnnnnnnnnnnnnnnnnnnnnnnnnnnnnnnnnnnnnnnnnnnnnnnnnnnnnnnnnnnnnnnnnnnnnnnnnnnnnnnnnnnnnnnnnnnnnnnnnnnnnnnnnnnnnnnnnnnnnnnnnnnnnnnnnnnnnnnnnnnnnnnnnnnnnnnnnnnnnnnnnnnnnnnnnnnnnnnnnnnnnnnnnnnnnnnnnnnnnnnnnnnnnnnnnnnnnnnnnnnnnnnnnnnnnnnnnnnnnnnnnnnnnnnnnnnnnnnnnnnnnnnnnnnnnnnnnnnnnnnnnnnnnnnnnnnnnnnnnnnnnnnttttttttttttttagttggagtcttactctgtcaccgaggctggactgcagtggcaccgtgttggctcactgcaacctttgtttcctgggttcaaggaattctcttgcctcggcctcccgagtagctgggattacaggcacccaccaccacgcctggctagtttttatatttttggtagtgacggggttcaccatgttggccaggctggtctcgaactcctgacctcaggtgatccacctgcctcggcctcccaaagtgctgggattacaggagtgagccaccgcacccgggccatgcctggctaatttttaaaatttttgtagagatgagatcttgttgtgttgcccaggctggtctctaatgtcagggctcaagcaattctcccgcctcagccttccaaagtgctgggattacaggcatgagccaccatgcccagctatgccataaaatttcatgagtttttttttttttttcttttgcgacagggtcttactgtgtcatccaggctggagtgtagtagctcagtcatggctcgctgcagcctcaaccttttaggctcaagagatactcttgccttagcctcccaagtagccaggactacagatgtacatcatgactcctggctaattaaaaagcattttttttttttttttttctgtagagacaaggtctcattatgttgcccaggctggtcttgaactcctgaactcaagcaattttcctgcttgagcctcctaaagtgttgggattataggtgtgagccactgctcctggcctcatgatacatttagccattttatattttataaaatcttgattcttttaccctaaagctttgtttaatctaattagagaaccatgcttttatttcttttgccaggccactgttgagtatttgccaggtcactattgagtaggctaggatttcagtggagatacctcgccagagacaaaagtttagcttgggttgatcaatattctttaggcaatggtgtccagccagatgtaaatctgtttgattgtcctatcatctagcacagatggcaaatatatcatttaaactaaagatttatttatactttttttagaagaatcatttatctttacatctctgcttttaaaaattgatacttaataattatttgtgggatacatgtgctattttatttatttatttgagatggagtctcactgcgttgcccaggttggagtgcaatggcatgatctcagcttactgcagcctccgcctcctgggttcaagcgattctcctgcctcagcctccatagtagctgggactaccggtgcacgccactatacccggcgaatttttgtatttttagtagagacggggtttcaccatatcggccaggctggtctcgaactcctgacctcaagtgatccacctgctttggcctcccaaagtgttgggattacaggcatgagccaccatgcccagccacgtgtgttattttgatgcatgcaagtaatgtgtggtggtcaaatctgggtaattaggatatttatcacctcaaatatttatcttttgtgttagaaacatttgaaatcttctagctattttgaaatatacaacaaatgaatgttaactatagttgccctactctgctaacgctagaacttattccttttatttaactgtatgtttgtactcattaaccaaccagtcttcatatgtctcaccacccttccatgcttcccagcctctggtaaccatcattctactctgtacctacatgagatgaatttttttttaactcccacataggagtaaagacatgatatttttctttctttgcttggcttatttcatgtaacatcatgacctcctcttccatttctgttgttgcaaatggacgtggttgagtgatatttcattgtgtatatatgacacatttatattatccattattctgttgatggatacttacattgatccacatcttggctattgtgaatagcgctacagtaaacacgggtggcagctatctctgcactgaattcattaataaataaatgaatgctataaattctaaatgctgtagaattcacttataattttaatgcactgatttcctttcttttggatatgtacccagcagtgagattgctggatcatatggtagatctattgtagttttttcacgaacctttatactgttctccttagtggccttactaacttatgttcccagcagcagtgcgagcattctcctttctctgctttctcggcagtgtctttttgttgttttttttttttttttgagacggagtttttgctattgttgccctggctggagtgcaatgatgtgatcttggctcaccacaacctccgcctcctgggttcaagcgattctcctgccacagcctcctgagtatctgggattacaggcatgcgccaccacgcctggctaattttgtatttttcgtagagatggggtttctccatgttggtcagcctggtctcgaattcccaacctcaggtgatctgcccaccttggcctcccaaagtgctgggattacaggagtgagccaccacgcccggcccgtttttttttttttgtatttttaataatagccactttaactggagggagatgaaatctcattgtggttttcgtttgtgtttccctgatgatcagtgatattgagcacttttcatatacttgtcagccatttgtatatcttcttttgagaaatgtctgtttagatcatttgtcctttttttttctttttttttttttctagacagggccttgctctgttgcccaggctggaggacagtggtgcaatcctgactcactgcagcctcaacatcctgggcttgagtgatcctcctgcctcagcttcctgagtagctgggactacaagcatgctgcctccataccaggccaatttgtttatttatttttgtagctatggggtcacactatgttgcccaggatggtcttgaatgcctgggctcaagcagtcctcctatcttgacctcccagagtgggattacagatcactgcctgcccatttttaaattggatttttttcttcttttctttttgctgttgagttgtgtttcttatatagtttggctgttaatcaattgtcaaatgtatagtttgcatatattttctcccgttctgtaagttgtctctttactctgttgactgtttccttaaatttgcagaaactttttaattggatataatcccacttctctagttttgcttttttctctttttagattttacccaaaagaaaaatcttttttcagaccaatgttctgaagcatttccttggtgttttcttgtattcgtttcatggtttcagatcttaacatttaaatatttagtccattttggtttgattttggtatatggttagagatagggatctagtttcatttctctgcatgtagatatccagttttcccagcactgttgattgaggagactgtcctttctcctgtgtatattcttggcacccttaaaaaaatgaattggctataaataaatggatttgtttcttgattctctgttgtcttccattggtctatgtttttagtccagtatcatgctgttttggttactgtagctgtgcagcatattttgaagttaggtagtatcatgtctctatttttttattttttatttttattttttgagatgggatcttgctctctctcccaggctggagtgcagtgggcatatcttggcttttttgcttttctgctgctttgcttttgcttttctttctgcttttttgatgtaggtgtttattgcaataaactttcgttttactactgcttttgctgtgtcccatggattttagtattttgtgtttctactgtcatttatttcaggaaattttaaaattttcttcctcatttcttcattgatccattgttcattcaggaggatattgcctaatttccatgtatttgtacagatctatttccaaagatctttttgttactgatttctagtttcattgtatatcggtcagaaaagatacttggtatgattttatttcttttaaatttgctgagacttgttttgtggcctaagtggtctattttggagaacccgtgtgctgatgaagagaatgtgtattctgcagctgttggatgaaatgttctgtaaatgtctgttaggtgtctttcgtttaaaatgcagtttaaatccaacgtttggttatttattttctttctagatcatctgtccaatgctgagagtgggatatttaagttgaataatagttcaagtccccaactattattttattttagtctatctcaccctttagatcaaatagtacttgctatatatgtctgggggctcttttgttacgtgcatatgtatttataattgttatattttcttgctgaattgatccgtttatcatcatatggtataccttttctgtctgttttacagtttttgacttataacctgttttataaggcaggagtagtatagctactactcctggtttgtgtttgtgatgagtaactttttttgtctcttcacttttagtctatgtctgtctttttttttttttttttttttttttttgtgagttggagtctcactctgttgcccaggctgaagtgcaatggcataatctcggcttgctgcaacctccgcctcccgggttccagtgattctcctgcctgaacctcccaagtagctgggattaccggcacccaccaccatgcctggctaatttttggatttttagtagagatggggtttcaccatgttggccagcctcatctcaaactcctggcctcaggtgatctgcccaccttggccttccaaagtgctgggattacagacatgagccaccctgcccggccctatgtgtgtctttacggggaatttcctataggcaacatataggtgtgtaatgttttttaatccagccagtctatattttttaattgggaaatttaattcatttacattcatggttattattgatagataagtactaattcctatcattttgttaattgttttcttgttgttttgtatatcctttgttccttttttccctctccttgtttattatttcagtttgttggttttctgtagtgataagattcgattcttttttctttcttctttgtgtatctgatctatcagtgagttttatactttcccatgttttcatgattgtgattatcatcttttcacttacggtaaccaccccggcgaatactttactttttgtagaggcagggtcttgctgtgtttcccaggctggtctcgaactcctgggctcaagcgattctctcacctcgctcggcctctccaagtcctaggattaaaggcatgagccagtgtacctggattagttttcttttttaatacaacattgtattggaaaatatttttccaagttattacacagcagttataatcttcctaattctgtaggaacataataattaggaatttttaaagaactttcttcttagccatttaatctttttttcctgtttaatgcgtttgaattatttggtatggaaaagtaatgaaattttcttgattgttaagacagaaaggatttggttgtaagaagatttatgtatataaattattattatttttttctccagtagcatttatgaatgataactgaccatagttagaaatccagatttttgtatttgataaatttaaatacgagatgatagcatttagatattttcataatgttaggcattcttataatgtttagcttagaatttgccagtcatttggaaatacctaagtcagttgttctcaactggaggtgagtttacccccagagatatttagttatgtgtggagatgtttttgactgccacagctggtgagggttgaggagatggacagaggatgctgctgtcatttagtgggtagaggccaggtaagtatctaaacatccaagtgcatgcaacaatctcatgataaagaattatcctggccctaatggcagtagtgtcactgttgagaaacttgaatctagattttctcaaacgttaggcaaaattattaagattggttaatattattaatatttattcatctagccagtatttgttcaataccatctatggtactctactagatggtggtagaaaaacatatgaaagtaaaaaataatgaaaattgtagtgtttagaaatagagaaacaagatttaaaactgatcatttctgttaagatatgagagaaggtggaaggatcatttgagcctcagaggtcaaggctgcagtgagccattatcacaccactgcactccagcctggacaacaaagtgaaaacctgtctccattaaaaaataaaaatatctcttccagggacgttgtctacaggcactcagaatgatccagcatgtgacaataccatcatagacttccctacaatacagcctctaacaaaactaggctgtcatgagcccttggtaatagaattgtcgacctttataccaagaaggttgggaaagcaccgaaatctgcatgtggcgtgtgcccagggagacttagaggggtccatgctgtgaggcctacagttcctgtgagaagatgccattttaggtgatacctgaaccatgaaatgtattcagctgttcatggatgaagaggaagagcataaaccttcccaatagatattgcagagctccaaggccttaaggtgggagcctcctgatgattggtggctcagaaccgtgctgtccagtagagcatttccttttgagcacttgaaacgtggttaatgcaattaaggacctgaattttaaattttatttaattttcattaatttaaatgtgaatagctgcaagggcgtttgaaaatgcccttctagaggctgacaaaatctaggtcatgtaattttgtaagattttgataaagtatttgggttttatctgatgtatagaaggagctgttgaagagtttctactaagggaatgacataatatttaaatcatgaaaatactcatatttattagcagatgaattggagtttataggttacatggggagcagaatgttaagagcagctaagtggctctggaatctgaccaaatgaattcagatcctggcgcttccactagcagctgtgtgtgtcattgggtaagtttcttgcacctcagtttccttcctcatgagtaaaatggagataataatagtgctgatctccaaaggttcttaagaaggttaaatgagacaaatccatttaaacctcctagagcttgatacacagtcatcactcagatatgtaccagcagctgctgccaccatcagtaagtattctattcttacaactacaatgaagaaactattcataccgtttatttgatatgaaatctgaacaagcttagtgtggtgttagataaaacgcttatgactttcatttcaatagtgttgcttttttatttttaaaaaatattaaaggctaggcgtggtggctcacgcctgtaatcccagcactttgggatactgaggcgggcgggtcacgaggtcaggagatcgagaccatcctggctaacacagtgaaaccccgtctctactaaaatacaaacaattagccgggcgtggtggcaggtacctgtagtcccagctgctcaggaggctgaggcaggagaatggcgtgaacctgggaggcagcacttgcagtgagccgagatagcaccactgcactccagccttggcgacagagtgagactccatctcaaaataaataaataaataaataaaataaaaaaattaaatgtctttttctgtatagacatgggatctccctatgttgcccacactggcgtcaaactcctgggctcaaggaatccttgtaccttggcctcccaaagtgttgggattaccggcatgagccactgcacccagccagtggtgttgcttttcaaactttagtatttatcatcaatacttattatatatttgtcatcttggaatgtccaactttattaccttagaaaagtaaactcctttaataaactactagatgtacatgatacaaaacttaggaagttaagggataaaagacttgtagtataattatccatgtgttaaatatattttctcttttgacttaaccgttgccatattattagacccattgttcatttttaataatcccataggaagttgtttgtagaaataatataattttaatagtgttgcctaggtgtagttgtagattattgtcactttatgtttaaaagctacttctctctctctgtctttaacttatttgggaaaatagcatttgggaagtagctgtttaagtgcttttcttcttctttttttttcctctctctctttttttttttttgagacggagcctcgctctgtcacctaggctggagtgcagtggcgcaatcttgactcactgcaatctccgcctcctgggttcaagcgattctcctgcctcagcctcctgagtagctgggattacaggctcgcaccaccatgcctggctaatttttgtattttggtcaagctggtcttcaatgcctgacctcgtgatccaccttccttggcttcccaaagtgctgggatcacaggcgtgagccaccgtgcccggccgtgtaagtgcttttcaaatgccagtttttgcagatggtagtagtggatacagtttttatttatggaaccttctgtggagtgtcaggactgcactggaggattacatggagtggatgtgtttctctttggttttttggagacaggttctcaccctgttgtccaggctggagcatggtagcatgatcatagttcactgtaattaactttgaactcctgggctcaagcaatcttcctgcctcagcctcccaagtagctgggactacaggtgcatgtcgtcatgcccggctaattttgttttgtttcattttctgtagtgacaggatctcactatgttgcccaggctggtctagaactcctggcctcagatgatcctcctgccttagcctttcaaggttttgagattacaggcacgagccatgccacctggctaacatgtttcttatattagatcaatcatttattttggctactaaagctaatgtgaattttcaatttattctttatatctgatatgaattgcattagctaatgttgaaaatcagtcatttgcactgaagaacctattgtatgcagggtatgagggggtggtagcggttgtacctactctcaagaaatggaatgaaatataataaaatgaacttactagacaacaatatcaattagtccactttcaagttctttggaagtttctttttacacttacaaaaagattcagtctattattactagttaagaattattattgtgctgtcaagaatgtttatggaatgtcagtttacctttgatattctaaaactgccctctcttcagtttttgggtggttccaatttatattaattgacatatctgaaacttagcaaaaagaaggtagtttgttttttattttatgtttgcacatacatgtttggctcttaaaatgttagtaggttatatagttcttttcattaaggagttttaaaaaattaatagttaagaagaatgtagttatatctacaccatgaagtactacttaaacatttagaacaagaatgaagtaggtatgtttattgacttggaaagatctctaatgttttgataagtggagaggaaaacatgtcattgaatatttattattgtgttgttgctattatttttacacatttgtaagtgtatagaaaggtttgtaataatgtgcttcagagtattaatcattttgccatagggagtggagtgggatttgaagggtaaagagggcactactttttcttttttttaacaaaaatcatgtttatacattattgtagcaattagagaaagtaagcatcaaactttttttttccacagtcttagttgccactgcctgatatgcaaattggtaataattctatcctgattcaatcactagatgcaaatggttttccacagtggccttaaaattttcctagattattgaaaaataatattgtattagcagtaataagttgtggcttgccgttttcctttgtggtcttaaatttatttttccaaaattttaatataggacagttagctgagttcaagtcttgcattactttgaaagatcatctttgactgaattctataatgatttataagataaccatgattgagtatatttcatttctctattcttcctgtgctcaccttttacgtaaaacaacaaaaaaaatctcattcttacccatgattagctcatcctcttttctttcgacaaacctcacagtcagtgtcatcaaatatttgtgaaatccagatgctgctgctgctttcctaccccctcctctcccccggtaaaaattcctacgagttagactcagtcttttttctgtttggcctttctttctaaatagagaacagcctttcctgttgtgacagcctaaaatgtgtttgaagttacttttctgtgttttcctaagtacaaaataactgaaagatcctctggcctcttggagcttgcttttccaggggactaaacattggagatgttgcagagcttttaagaatattgagataaacttaatttagaaaacatatattgaatgagagctatatgcaaggttttgtgcctggtaatgtgagaaagcagtggtggacactatgatccttgtctttaagagtgctcattttaccaggcaagatggtgatacgttgttttaagtacatgtgggaatgtgaggaagagacattaatgattatgtaaatgagaacaaaaatatgtaaataagtagtaacatttactggtatagtttttctgggttctcattaagcaaaagtacttggaggagtgaagcatggttaaacagagaaagatggtatctagatgaactctaagaagccataaaatgtaggtgggcagcaagtttggactgcatcttacaagatattggaatgagtgtacatacatcagttaaagcctttgaggtggaggataaggttacagctacatagtgtaatgagccatgaaatagataacaaaaattgaccaaacctaggcagaggagttaactggtgaaaaactcaacagaacagtttatacaggttgagcatctctaatcaaaacattcaaaatctgatatgttctaaaacctgaaactttttgtgtaccagcattattctcaaaggaaatgctcaatggagcagttcagattttggattttcagattgggggtgctgaactggtaactgtttgcgggtgttccaaaatctgaaatctgaaacatttctggttccaaatttttcagatagggatactcaatctgtagaacattttctttattactataagtaacacttactgtgtaacagttacttttctaagcattttatgtgtattaactcaatccttatgacaactgtatgaggtaggtataattacattccccattgttagttggcaaatagacacagaggtgacgtatcctgcccaaagttatccaggtagtgtgtggtagaggttggatttgaactttggtggatcttttaacatttattgagtgactacagtgtcccagacactgtgctaaatgctttacattcatgatattatttaatacttatgacaacctttatttacaacaaaggaaaatgggacttggagacatgtaatttgaatacaggtctgttttgaatctacaagttcatgtgaagtattctgtttttttttttttttttttttttttaaagacagagtttcactctgtcgcccagactggagtgcaggtgcagtggtacgatctcggctcactgcaacctccacctcctaggttcaagcgatactcatgcctcagcctcccgagtagctgggattacaggtgccttatgcccggctaattttttgtatttttagtagagacaggtttcaccatgttggccaggctggtcttgaactcctgacctcaggtgatacacccacctcggcctcccaaagtgctgggattatgagcatgagccactgtgcccggacccttctttttgttaagatcacaaataaggtcaaaagcaatactcaatttttgggggattagggcccttttgaaaatctgatgaaaggtatgaatctactttgcagaacagtaaacatacaaacataggggttttctttttttattttattttttgtttatttatttattttttttgagatggagtctcgctctgtcactcaggctggagtgcagtggcgtgagccactgtgcctggcctctttttttattttttaactgcagttttaagagagttcaataactctcactgataagattccttattctagtctagacagattttccccttgcagtggtgctgtgttgcactttgaacctgattcctaggatttggaaatagctcaacttcgactttacggtgtattaaatggagaggtatcttattaagattttatttacccttctattttgaagtatttttcttaaaaagcatttatacatgtggtactcagttgtattctggttattaaaaattttatgtctttttctacccatcatggtatctgcttgctgattaataacatttatgaaagttaggattccttgttgttaatatttaatgtgaatttgctcattaaatgttaaatcagataccttgttaaaatattatttaataaaagccagacgtggtggctcatgcctgtaatcctagcactttaggaggctatggtgggcagatcacctgaggttgggagttcgagaccagcctggccaacacggtgaaaacccgtctctactaaaaatacaaaaattagccaggcatggtggtgggcacctgtaatcccagctgttcgggaggctgaggcaggagaatcccttaaaccccagaagcagaggttgcagttagccaagatcatgccattgcaatccaccctaggtgataagaatgaaactccgtctcaaaaaaaaaaaaaaaaaagaaaagaaaaaaattacttaatatgtatttacctgattacttttcttcaaaagaaggattaaccttaaagatacaagggtatgttattttgttaaatgccagttataaatgtcttttgaatttctgggataagaaaacagtagaaataataataaagttctttaatgtttgaaaactgaaaatgtgtttctttgaactgtgggatattcccttcacagcaattttacaaagtatatgtactgtttttaaaaataaaacaactgatatggaccacgtttaactaaaatgagtcataggaaattagattttaataactagttgtgtggtaaatggagttttaattattttaaggaaaaggaaagaaagaccattagtatctccaggcatggatttattattgccatgaagttgttgtcatgaatagaacgatcagtttttactgtaaactttgatagacactggagcatttaacttcaactttatacagttccctttttatcttttaaaagcacatctggctgtcgggaattctgtaggcaagaaattgtgaaggattagaaactgttctttgtgcatttaaactgtcattctgtggttgcttaattgccatatagaatgcagaatactagattagaaaggtgtttagtttctttagctgttacagatcccaaagaacttttgactatgttaatttcttatggctataacatttctatgttaattttttacatatctaatgtaaaatcaatggtatattgttattctttgttcaataagcatttgtttagtaactttattttttttaatgtttttatattttttacttttttttttttcctccaggagtggactgagtctgatgaggctgcagggcctggcccctcatccctccccctcccgccataactctttaaaaaattcagaaaaatcaattaggatgaggtgtcaagtatttagttatttgttattattaattttcttttgagacagagtctcgctctgttgcccagtggtatgatcatggctcactgcagccttgacctcctgggctcagttggccctctcccacttcagcctcttgagtagccacaacctctggctaatttttgtatttttattagagacagggttttgccatgtttcctaggctggtcaagtatttattttaaacttgcttaaaggattagactttgcaaaccacagctttaggtttattgtaacactctcacccccatttgtataaatgaaaatcaagcaggaatcatttcaccccaaaactgtcttacacttactggcttaatattaggattttaaaccaacagtttaaatatttgtaaataattaaacacactttttatatactaggcattatgataaatattatcttaatgtgttgaataaatcagcatgataagtccttacttttcacttttacagaagaggaaactaaacttaagtaatttgcttatatagtttctgtatagtagagccagaattcaaacttaggtctctgacaccaaaacccattctcatttttttctttttttcttccccccgccgccccaccactgttttttttttaagatagagtttcagtctgtctcccaggctggagtgcagtagcatgatcatagcttgctgcaacttctgggcttaatccttctctcccagcctccctagagctaggactacaagtgcacaccaccatgctaaatttttttttttttttttttttggtagaaacaaccccatgctcttttattgatgctgtttagcctacttggatgccttgaatctgtttaccttctgtttatgttccttctttcaagtttgtgtttggaaagtgataattcgtgactcagcctcagaatggaggcatatatcacacatcttacatgatttggatctgtgtcagaggaacttaatattgtggttttgataatataattgaatttatgcttatagttgaatactaaaatctgagatttattaataccttggaattaaaatagaattcacttaccttggatcagttaaataactagttgattagcaactgactgaagatcaacaggaaaatagtaaggcattagttttaaaaaattaagttgtaagttggtaaatgactaattccattgcagtcactgaatgtatatcagtaatctccagactcgcatacaaccttgtcttggtggaaagctctgactatggattttgaacataagaaagagaatgtgagtgtctgttaaaagccatcactcctcagatgatgttaaaagtcttcactccacatcttctgaggagttgtcaagtgttcctgcttctgaccacaaggacagcaattggcctgtaatatatgtattccttgaaaaagtaaggagttaatttgttatgcttgtgtagactgttactaattttgtgtagttttactaaatgattggatttagtagaatagacaaaccttaccactctttttttttattcaagacagtcattcctaactgatcaaggttttgctgttgaactgggaaaggaccttggaatcataatatagtgctacacgattctattagcagtgaaagaaataaaaatgtttttactatcttggcttcctccctttacgctgtaaagcagccctggctacctgatgtcttcatgagttgatattctaaataattttaccctcaaatagccatataatagtaagatttggttgaattagtaacagagaaaatatttatagttaaacatctgagtggccacttgtctgcaagtactgtcataagtactcattaaatcctattcctgtccacaaggattgcaagggcgcaaacagatgataagaatcagtgatcactcactgattgtgtccttgcagtctctgggtggctgcagggcacaaaggatagcatgaacctcgccattggctgcagggcacaaaggatagcatgaacctcgccatcctcaactacatcattggcttaagcaggattttataagacagtctggatacctcactgccaagttccaaatagcagattttgctcactataaaattaatgtgtctgctagaaaaatggaaacacagagaaaagtatgacaggaggctgggcatggtggctcatgcctgtaatcccagcactttgggaggctgaggcaggtgaatcacttgaggtcaggtcaggagttgcagaccagcctggccaaggtggcaaaaccccatctgtgataaaaataccaaaaaaaaaaaaaaaaattagctgggtgtgatggcatgcgcctgtaatcccagctacttgggaggccgaggcaggagaattgcttgaacccgggaggcggaggttgcagtgagccaagattgcaccactgcactccagtctgggcaacagagtgagactgcgtccccccccccaacacccccccccccaaaatgaaaagtatgacaggaaaaacatccgtgatgttgttaacaaaagactcacaccacccattttaacgtgatccttcaagttgttttgctgtgcacttaaaaaaaaaagttattagtgcaccaccgatttctgtcctgctttctttacttaaaattataccataagcaacttctcatttttaaaacacatttttctaaatatatattttaagaatgtatttacttgttctctaatgagttagtattttttactcttacagtgttcaaacaactgtcacatagtttcttggcatccataaattttctattttttttaacgctctctcagcagaatcaatattcttttcaaaatactgcctctaacttttgatctgaacccttgttgttctcaaagtgtaagtcaggtgccaccaaacccttccagattcttctcagacctggttacttttgatttttcagcagtactttaaatacatctcctattagccgggcgtcgtagcatgtgcctgtagtcccagctattcaggaggctgaggtgagaggattgattgagcttgggaggtggaggcgccactgagttgtgattgtgccactgcattctagcttgggtgacaaagtgagacccagcctcaaaaaaattaaaaaaataaatatatattctatggtatttatcacataattcatttatgatgacagagtaggtgaaattaggaatcatatcaaactggtttggattgctgtgtggtatcctgcctatcctttatattctgtcccagcatcagcagacccattatttaaaatatatatatattggctgggcaccgtggctcacgcctgtaatcctagcactttgggaggccaaggtgggcagatcatctgaggtcaggagttcaagaccagcctggctaacatggtaaaaccctgtttctactaaaaatagaaaaaattagccaggcgtggtggcacgcacctgtaatcccagctacttgggaggctgaggcaggagaatcgcttgaacccgggaggcagtggttgcagtgagccaagattgcaccgttgcactccagcttgggcaacgagtaaaactccatctcaaaaaaataggtatatctatatctgtatctatatctatatctgtggatatatctactgcttacgtcttctccgtggtgctagatccatatcaatcctgagactactgacattggtttgattgttccttagtcaccttttgcctatattttgaaattctgagattctgactttgatttaattttagtttaggatattactgatttattctctgatgatcttgtttattttcttttagaattataagcagaggctaggagtagtggctcatgcctgtaatcccagtactttgggaggctgaggtgggaggattgcttgagcccaggagtttgaagccagcctgggcaacatagtgaggccctgtctcaccaaaaaataaaacaaattagcccagtgtagtggcacacacatgtagttttaactacttgggaggctgaaacgagaggattgcttgagccctggagtttgaggttgcagtgggctatgatcgcactactatgcttcagcctgagtgacagagcaagaccctgcctcagaaacaaacaaacaaaaagcaagcagagagactgggtgcggtggctcacgcctgtaatctcagcactttgggagtccaaggtggatggatcacttgaggtcaggtatttgagaccagcctggccaacatggtgaaatcttgtcctattaaaaatacaaaaattagccaggcatggtggcatgtgcctgtagtcccagctacttgggaggctaaggcaggagaattgcttgaaaccaggaggtgaaggttacagtgagccgagatcgcgccactgtactgcagcctgggtgacagagtgagactctgtctcaaaaaagaaaaaaaaaaaaaaaaacaagcagagaaataaaccatattgattacataatgagagtgagcacaaccttgagtatgtaacaattgacattgacaaaattgatccagaaataaattttagctttgccttttgccatcttcctctcataagtttcagactttttcatctgaaatttgctagttttgataattagcttagatgctatgtggaatgttggtaatgaacctacctctagatttacttgcttggccctgactgctctcctgagcttagattcatgtattcaacacactacttattatttccatttgaatctctgataggcatctaaaactacttgtggttatccctttccctttgtctattctgcctctaatcctgtctcacagtaataacaggttgaacatcccgatccaaaaatatacaatgcttcacaatctgaatgttttggagtgccaacatgatgctcaaggaaaatgatcattagagcatttggattttggatttttggattagggctgctgaagtggtacagtgcatatattcaaaaattaaaaaaaaaacctgaaatacttctggtaccaagcattttggattaggaatactttcccttcttcccacctaatctttcaagccataaacttaaaatccatccctgatatccataatctatcactttcaagtatactatataatttatttaagtattatggctgttagtatttcagctagaccataaactccaggaatgcagggattttagtctcttttactgatgtattccatgcacctagtacaatgcttggtataaagttctcaataaatatatgttaaatgaatgaatgaatcaatcagtctacattcctttctgttccacctgctcaaacaaagtatcttgttactaccgtgttctaagccaccattagttgtggccaagatgattgcagtagctttgttttttttttttttttttttttcttaagagacaggatcttgctgtgttgaccaggctgtgatgcagtggcttttcacaggcatgatcatggtgccttacagcgccgaactgttgggcctcttgccttacgctcccaagtagctgggactgcagatgtgagccactgtggcctggcatgatagcttttaactaatctctgcttctattcttgtactcttcagttcttattcttacaaagcaaccaaaatgatctttggaaaacattcgatcttttcacactcctgcttttaaaacttccagtaggttcccagtcatgttagaataaaaccctaagtccttaccatgccaacaaggacttaaatgtgtgttgttttaagctgttaagtttgtgatttgtctcttgattaattcagataactgataaattacctagccagatcagtgttaccctattatattcactggcaccccttattcttcagaggagggaattattcagggtgtgtacaccaagtacaggaatactgagagccatcttagatttgagtccaccctggctggatgcagtgacgcacgcctgtaatttcagcactttggagggccaaggcaggcggaccccttgagcctagaagtttaagaccagcctgggcaccatggtgaaatcttgtctctacaaaaaataaaaaattagccgggcatggtagtgcatgcctgtagtcccagctactcaggaggctgaagtgggaggatcacttgagcctgggaggtaggtggaacctgcagtgagccgagatcgggccactatacacctgcctaggtgatacagaccctgtcttaataaaaagagtttgccctgtggccctcaaggattcacatagggtccactttcgttaacctttgatacctagacatttttggaagtgcttctttcttattcgtttattttttcatttgttagcattgttactgaccctccaattttaacaacattttcttgtttctattggatagttactaaataagaaaagcaaccctcagaattaaacccagtgctgacaaagtccatagtagaacatacatggtatgtgtttgcttgagtttttaagtattacttgaatcatataaaattatttttcttttttaaggttaaaatatacttgaatatctgtaaatctggaatttcatgtaattcaacctattaagtataggtaagagtagagcaaggaggaatgccattttctttttctttctctttttttcttggtggttggggattggcaatgatattaacagaattcaaatggtgtcatgtataagtaaaacttccttcctcatatccactgtagtgctccttttagttgagcagaccagcttttatttagttctcaatatctgtagatttggggaaataaatgacctgaaggaagaactaggatgatacaaaatattaatgaagggaaaaatacttgacttatctattctgctgcttgaggagcataaagtatagaaattacccacataagaaaagctttgggatctttcaaaactacccagaattgaactttgttatttctgtgtatgagttgcagctgctgaaatgttttgagatgacctcactaaataaactttatcttgggatttagaaaataagggatgtcacacatataaaccatgtgccttttacctttataggaatcatttgttgctgaaaaattaatttacttgataggaatcctggagtttcctgttattcttttagtaactgattaattactatactttttaaagcagtatgttttcattcatattatataaaatatatagaataaaaacagtggtttgtgtgtgtgttatatttaacaatatatctattcagtcaatgcctgtttgtgtagaatccagtcacaagtctatatctgagtatttatagaaagtttggccaggtgtggtggctcatacctataatcctggcactttgggaagcggaggtaggaggatcacttgagtttcagagtttgagaccagcctgggcaacacagtgagaacttgtctctacaaaaaaaaaaaaaaaaaaaaaaaaaaaaaagagagagagagagaagaagaagaaaaattactgggcatggtggcatgtacgtgtagtcccagctactgtggaggctgaggtgggtggattacttaagcctgggagatggaggctgcaatgagctgtgatcacaccaatgcaccccagcctgggcaacacagtgagacccgatttcattaaaaaaaaaatgaaaaagcaagtttatatttgatgatgatcatgagatacccctagagccatgtccacactctggctgcctgtgtttttaatataccaatatatggtttatttggcttgtagtgtgtatgggaagtcaggacaatttcatgcagaaagccttatttttggttactcttgaaaattttgaagaagtagcactgcttatctggaattcctgcatgccagtacttgactacaggagagtatctcagtatctgctgccctctggggagtggccattctcttatcgttttccatagtccctaatctctgttgtttacatctggccagttttttcccattttgtttcctccagggggtatttctcttgctctggagtcatgtaagaatgatcatgttaaggaaactttgttttccatattttatttattatttgaaaattgtggtttatgtatgatagctcttaattggccagaatataatcaaatccaataagttagtgctagataaataaactttatacctaatgactaatcctaatttgcatgatctttatggtctaccttaaatttttaaaaaactctgtcaagttaatattggtcaccaaccaccaaatatcattaattttataggagattattttttggtggaaatcttgaatgaaaattcactagctacctgaagtttccactgagtcaaaattttagagcttttctttcttgcagcagtatttctttttaaattttctttcttctatgcagagtaacagtataataccaatgtaagtgatattttatcacaggtgttagtagtttgcttgtttttgtctttaatcttgtttttgaggtaggtggtgtggaagaggattaaaatacacgttcatataagtacataaaacttaaaggtagagtttaacaaataattttaaagcaaaaaaaaaattttaaaccagctttaaaaaaatcacatgccctttctgtcataatttcctctctccccagaaataatactatctgccttttaaaagtcattttcctgcttctctttatagtgttgctaaacatgtgtacatctattgactaatacggtcaagttttgccggttttggatatttggataaatggaatcatactttatatattcttcttaatcttttactcagtaccatttgtgagggtcatctaaattgtgttatggtagttttttattctgtttctgtataggaaaattttcagtgtatgaaaatttcattattgatcaattctgttaatgaacagttgggttgtttccaatttttggttattaaaacaatacaactatgaacatttttgttcatgtaccctggtgcacgttttcattgttttcaaccagaggtatacctaggagtggaatggctgggtcatagggcatgactgtttccaagcttaccagctactgccaaattgcttcccaaagtggttgtaccagtttacatttctaccagcaagagaatgagaattttggaagccccacattgttaccaatgcaaaaatataatatctgtaagaagcaaaaatgtttctcgggcatattttcttttaaatgcaataagcagtacacacaaacatatattgcactacaagaaatggttgatgtattttgcttaggattaatattatagaaaagacaacagtctgtttagctttggaggtagttaagtagttgctgttttcagctgttctacacctctgctccctcccagccttcataattgagaaggtagcaatatctttcaaataatgggaaaacgtacttgttttctttgtatgagaacttgttgctactccctttaaagaagatggatttcaacagtatgacctgaaattgaacagtttaccaagagagaagaacccttagctagataatagaggattcagtaatcattaatttaggaatattttgcaagaggtatttaaattttagtgtaaatttgatttttatctatgacaattttattagcctttgtgccatttctttgggataggattgtgctatttctgttctgtataatttctagtaaaagatggtatacctttttccctggcagagacattaagccctgtaacaaatacactaaaagcgaatatggaatgcctaatgcagtgtgacatatgtaatagaggatcttatttgaattgaatagagcacagtgaagctgagagatttttattatatgtaacagcctgtttctaggaagaatttcttagaaattctagttcttctattattttgatacagacttattttctttggcctgcttttattagtagacatccccaaatttaggaggaagtgcctttttagaatatctgataccaaaggattaccagtttggcagaactatttagagttgcaaaggatgcataccatagggatatacccctgaaagttgtttttcattggtgtttcctttaaggaagctttttatgtagaaagaacagcactttaggctttggcacaatgctttttctctttctctcaaacatttgtgttttatggggcaatataatagttttctgacaaaccaatggatactaattttatgtgtaataatttaaattgttctttcagtattctttagtatatgtcagtacctctttacagttctgtaagaaacatagcttacagtctttacaactctgcagatgtatttttcctttattattcctaattatttcatatatttctgttgatactagtgtacaggtttatattttttatgtatttagttcagttgtgttacttcattttctcattggttgctatttctacctgtttttgccatcatatgaaatgcactggatatatctttaagttcctaatttttgaggtgagattttctttagggtatgtactctaaagtgaaataattttggggtgatggttttgaagcacttggtgacacattgctctgtaatcctgggaagatagtaaagtaacccattcacagtattttatctgtgtcctgtttccttagatccctgccaataatggggcaaagattttattttaacttacttttgttagtttaattgataaacatacaatgtattttaatattttttatcaatagtattttaaaaatttactatgatttaattgtcatgggcaaatttggtatttaatttttatcagaataaatcataaaactggtctaagatagattttatatagttaacttctttgctctctttttattttcactttatttcactgtacagaatttttcccgtgttaaaaatgtgtattcatattgaggtttttactttagcaaaatatcaaaataattaattctaaaacatgggaaataatataaattcataagctttgttgtaagaaattttcttataagagctcttcatttctgattattaattttctaaagtagatgtttaaatagcaatccaacttttctcctttgaaaaatttccttggtgagatttatatatgctgttacatttcatggtaaactttatgcctttataaatgtaatagtcactcaaaattggaaacaaaattttcccaagaaaatcataatcaaagttatttaaaaaacaaggatgaaactagatacaattattttaagtgttaatctttggtcatatggtagcatcatttatgtgtcttttaactcgtaagcttttggttctagttagttctgtgtgagtccatttgatttcagtattgggatcaggtagctgatcctgaagatgtttatatctgtttagagagttataagtgatttgaaggttagagtaccagggactagattttcttcagaccttttgactgagtgaattccaggccattttcctttttccctgagcagagtttttaactttatgataaaattcagaagacctatgaactgaaaatagagaatatgtctaatgatgaattttagcatttctttgcattatgaatatagacaacaattgccattagttattatttttaacgcaccactgaagaacatatattactatgtcaggaatttgtttttgtttttttctttttcttttctttttttttttattgatcattcttgggtgtttctcgcagagggggatttggcagggtcacaggacaatagtggagggaaggtcagcagataaacaagtgaacaaaggtctctggttttcctaggcagaggaccctgcggccttccgcagtgtttgtgtccctgggtacttgagattagggagtggtgatgactcttaacgggcatgctgccttcaagcatctgtttaacaaagcacatcttgcaccacccttaatccattcaaccctgagtggacacagcacatgtttcagagagcacagggttgggggtaaggtcacagatcaacaggatcccaaggcagaagaatttttcttagtacagaacaaaataaaaagtctcccatgtctacctctttctacacagacatggcaaccatccgatttctcaatcttttccccacctttcccccctttctattccacaaaaccgccattgtcatcgtggcccgttctcaatgagctgttgagtacacctcccagacggggtggtggccgggcagaggggctcctcacttcccagtaggggcggccgggcagaggcgcccctcacctcgcagacggggcggctggccgggcggggggctgacccccccacctccctcccggatggggcggctggccgggcagaggggctcctctcttcccagtaggggcggccgggcagaggtgcccctcacctcccggatggggcggctggccgggcgggggctgaccccccaacatccttcccggacggggcggctggctgggcagagggcctcctcacttcccagtaggggcggccgggcagaggcgcccctcacctcccggacggggcgggtggccgggcggggggctgaccccccaacctccctcccggacagggcggctggccgggcggggggctgacccccccacctccttccggacggggcggctggccgggcagagggactcctcacttcccagtaggggcggccgggcagaggcgcccctcacctcccggacggggcggctggccggggggtgggctaacccccccacctcccttccagacggggcggctgtccgggcggggggctgacccccacctccctcccagacggggtggctgctgggcggagacgctcctcacttcccagacggagtggctgccgggcggaggggctcctcacttctcagacggggcggttgccaggcagagggtctcctcacttctcagacggggcggccgggcagagacgctcctcacatcccagacggggtggcagggcagaggtgctccccacatctcagacgatgggcggcctggcagagacgctcctcacttcctagatgggatggcggccgggcagagacgctcctcactttccagactgggcagccaggcagagaggctcctcacatcccagacgatgggcggccaggcagagacgctcctcacttcccagacggggtggcggccgggcagaggctgcaatctcggcactttgcggggccaaggcaggcagctgggaggtggaggttgtagcgagccgagatcacgccactgcactccagcctgggcaccattgagcactgagtgaacgagactccgtctgccatcccggcacctcgggaggccgaggctggcggatcactcgcggttaggagctggagaccagcccggccaacacagcgaaaccccgtctccaccaaaaaaatacgagaaccagtcaggcgtggcggcgcgcgcctgcaatcgcaggcactcggcaggctgaggcaggagaatcaggcagggaggttgcagtgagccgagatggcagcagtacagtccagctttggctcggcatcagggggagaccgtggaaagagagggagagggagaccgtggggagagggagagggagagggagaggagggagagggagaggagggagctaggaatttgttttaatatttttatacctgtatttcaatatagatcatttgttgtcataatcctatgtattttatgtatttaataacacgattctgagaagtctgtattttatgctagattggcaaagggtttgtgttcctctcaaatttaagaactattccttaaggagaatgacttctttcattttagcagaggacagaactgcccataattcatgaaagtttgcaaaaccatcagtgttaagtctgcattagtgtatgagagggaagagctggctaggattgattggtagacacttccactaggggtctgagtaaagtggtttcatatccgtaatgggctgatgagcaatttattgcctgcaaaaaacggagaaaatgaaatttttggttacgtaaaaacatgctgattatttttcagttgtataaatttgtgattattgtattatattagaaaatataaatgagaaaataaatacctgtaatgctttctgttaagattttggtatatctctttacagatctttaaaaatattacatatacatgtttttagatgtatgtgtgtgtattatatgcatacgtaaacaaataatgtatatagaaatattcctacacatgtgtatgtatatgtatatttagatgtcctttttaaaaatttttttgtatttaaagagatagggttttcctctgtcactcaggttgtagtacagtggtgtgatcatagctcactgtaagccttgaactcctgggcccaagcagtccttttgcctcagcttcccaagtaactatttctacaggtggatgccaccatgcctagctaatgaaaaaaaaatttttttttataaaatacagttgaagtcttgctatgttgcacaggctggtctgaaacttctgttcttaagcagtcttcctgtgttggcctcccaaagtgctgggattacaggcataagccacagcatctggccagatatatgtttttaaagacaaaaatgagattatgtcgtataagtaacttgccatttttggagtttagatttattgagatgtaatttagtaaaattcaccctttttagtgtatacgtccataagtcttgacaagcagagacattcaattctcactataagcatgatacagaacagttctgtcaccctcaaaaatctccttgttcctcttctgtagtcatctccttcctctttcaaccatttatttcttttctgttccttttacaaaatggtatcatacagtttgtagtttgaagtattgtttctttcctgtagcatgtgttttcctttatgatttttggttttgagatcatgcttcaagaatcttttatcaaattgatgagaatattcatgtatatatttttaaagaattctgtttttttcaattttaaaaattttaagtgtttgttcagtctcgtgcttattttagtgtaagttgtgaggtaggaaatccaattaaaaatcagatagttcagctgtatttattaagattgatttactaatataatgttcttactaaatattgatttcctcacaggtaacacaagtggcaagacagccgggaacccctaccccatccccttattcagcacatgaaataaacaaggggcatccaaatcttgcggcaacgcccccgggacatgcatcgtcccctggactctctcaagtaagataaaccttttttaaaaaaataagaaatgtccctgtaaaagcatcatttttgtttttctaaagagactcctaagcagtaacataaaacattacttgtatagtaatttcaagtttgtctttggcatcttttcagacttaaccgttcataaagatggctactaacaaatttcacacatttcattttgaagtcattaaaaattaactgttggtgatatttagttttcattttcattgtttaagaagttagagttttattctaaagtttactggaaaacccccccacaaagcactgatttgcttttcgatgcttaatctgctaccgtctcgcacccctttcgggtgaagcattaatggttattttctacttatgtgaaaacttggtgtcttcccctcttgagtagcatcagtgggattttttgtttgttggtttggttgttttctaagtcgattattgtaatttgataggcttaagtttttgttgaactgttagaagaattgtgaactccttagtgtatttctacttaatagtaacaacagacgttcagacactgtttaaggaggatgttcctatgtgttccttgcacttaagctgtttgccaagatatattgtttagcttgcaccgacctactgttgcaagcttgtttggatttccttgtggttaaaagttggctagagttataaagtcccttacagaatgtggactgagtcaagccaataacgttgatctaactgtgtgagattatcagtatttacatgtaacagctactcttttgataatgaaaatcatttttataacattatttgtgattttagcctccatattttaggccttttagagattgaataataggagagatcaggaattactaaaaataatgctaaaggtggtgattataagttaagggctgattttattttttattcttcattattttttagggacaatttttattccttattatttttttaaagacagggtcttgctccgtggccaaggctggggtacagtggcatgatcatagctcactgtaacctctaactcctgggctcaagtgatcttcttgcctcagcttcccagttagctgagaccacaggctcatgccaccatgcccggctaatttttttcttttggttaaattttttgtagagatggggtcttgctatgttgctcagattggccttgatctcctggccatgtgctgattaattatattttagactatagaatgtttggaaaaggaatgtacagtttgccaaaccatgactgaaatagccctattaatgaatataagtttgtcaagaacttagtgctatacctaaacttagtctaaatcattcctatataatttggagttttaaacattgaaaacaaaacaaaatgagctcctgattgtttaaatgaggttcctgtgttgggtttcttagactgaacacaacctctcaacttactattaaggtgtattaatctgagtctaatcaggagagaaaaactatgcactctcaagaatataagatataaagagcaaacgcttaccttagggctgagtagaggctcagatagggagcctttctctgtagggttgagccaaaggctgtggtagaagagccactgtggtgctgttcagaacttgctgaaactctttgttctggaacttgctggaaatgtgccctatgaagtattggggaaagctttcttctccagcaccaatctcttatagccaagagctgatgcagggcacaatggctaaaaggctccttactgcatatctgtttcccacagacaattcaaaacattagatccactggatcagaagtcccaagtggtagagcagcttgcactgcccatcccaaatttgctgtataaccttcgtatattgtgttccctactcaaaattggaaacttcctaggtgactctgtagtcggttaaggtggcacattcagatgtagtatatatgttgcctctacatccaaaaaaggcctaccaaacctacgtcttattttttgtggtagttttaggtgagagactgctacccctaccctgggctaagatcttgaccttgttggagagggcacggtgtggctttctgaatgggagtggtgccatttcagtggaagttactgaaaatccaccctcagaacttgtgagaattctgccctctagggtgccgagggaaagctgttcgcagggaggtttcttagaaaagccactgtgctgcgtgtcttcctgagggaataccaggggtagctcttggctgctgggtactgttgcttgctgtgcactgaagcagaaatcttgctctgatgaagctatgtccatgaggggagctagtcactagagaagccatcttttggagaagctatctgggctgcaggagcaaccaggaaccaggaaccaggaaccagggagcaaaaccctttccttctacatatctctagagccttctactgacaaaacttaatgttgtgtcagctgaaatgttaaaatatttatagagctcagatccattttcttattacaggcaaacagtgaattttgatatgaaagacaagcagttgataactggcatgtaagggaaatagcttagttttccatttgaaattcttactgtttcaagttgtgatttgacccaagcagttggcccaaaggacttaagttttctgaaagataggctgctcgcaaatgcatagtttgcatttaagaaaagatggtctcctagcatctcacttgttaaatcctcaagtgctgttctatatgccattttaccaggtgcctttagaaaccagagtacatgaataccagggagaatggccaccaaatattgtgttgcattcttttgtggtctgttttgccaccattttgcctaatctaatgaatgaacccagtaaatcacacctggttcaatgcccttttttcccctccatcctttcagacagagggaagcctctatggattcatctgtctcctagcaatatgttaacacttgttgatatggtgaggaagtttttctaaactagcatacctggaaaaatgaagagttccatgggaaactcaagttttttttaggtttcacagttgaaacagtttgtaggggcagatgcaaagcttcccttctgcccactctgagggtttgctgaaatgctgatgatagattaataggagaaaaaggcatacagatttatcaatgtgcgtggacacatgagagtcctacacatatgaaacacgaagaagggagagaaggttgagggcttgagtaccctcttcatagggaagagggaagcagggtggggaatgggctatcgggagttttagaggggaagtaaatggtttttaggtgaaatgaatgagtccaaattacaatagtcttagacaaagttcctctgagctcctgggaggtggcgggaaggtgaggaatgagacttcagtgtgaacaaaggttgtcttattatgaaggttaaatctcctaagagttacccccaaaagtaaaatgaaaagtctgtcttgatgtggtgatggctttagtctcttctgttttccatgattaatcttttgtgattatttgatgagcttccatgggagggtggtcttaagacaattgtgtttcttttggaaagacattttcttagtcatatctctgtgccccaccaagttcatggatggtaatggaaagaagagcgttcaaaatagaggggaagggattataggcttgaagtcaaaccataggttctagggctggctttgttactttctggttatatgatattggataaattatttaatatctctggaacttcgtttcttcatctgtcatatagggggaaattagaattctactgccctgtaagagcgttgttatgatggttgtgtaaattcctgcctcagaacaggatttcctaaatttagtaagtgcatttattatttgtattcctgccagacttggttctcctcaagatttatatatatgtatgtgtgtgtgtgcatgtatccttgcctgctaattcttttatttggctacctgtcgagatttagtgtgaaacttagaagctatctccaagagtttgaaatgtcttccatgtcttttctgatgttcggataaaagtaggatattaggcttggttattttctgttggcggtaatttgttttattcttctatacaaaacagattcagtcaactgaggataagatcaaagaaactattttttagctacatgtcctttttgatgtgacagtctccccttcttctgtgaattaaatctttttgtccaaagtaactacctatgtctgtgactcaatgtttgaccctcaatctactaaggtctaagtgaaagaagctaagctgaagaaaagtgaacttcataactttgaaacgtgaaagagggaaaatgaagaatattgtttccaatgtcctctgcaatctcattacctgcttctttgttaagacaggattttacacatccacaggtgcttcaccacacctgtgtatgtgccaagttttaaggcgtaatgtgcatttcccttttttacatgagctgtagttctttctagcttcgtcctctctggagattttgtttaattagtcaaagactttagactatgacatttcagacaatggtaaattggtgagacagagtctttataggcatagattcttttcagtttccctgaaatggcaacacttttgaacaatcttgaaacccagcatgtctgttctctgggaagagtaaatagtttggaatttaaaagtaccttttggtggcagattgcaaagtaaatctccctggggaagtgcactctagggagtcaggagaagagactctctaatttagagttccaaccctcctaccactgttttataatttaacctatggaagttcctattaatgcccagttttcttctttgtgaatgagcagcttttgttagatgagatcagaattttctttaagacttccgtgggttttggacactaacttgaaagtagccagttgttgttatggaaaattataaaactattttagatttaaaattacccaaactttgccttgtttcattctgtttttttttttaagagaagtttgaattatttaaaattacttctcaagataagtaaaaacaaaagagactcctacttattgcttaattggtgatgcacatttgctttaacttagttaattttcacgaagtagcaattacaaaacagaccaaactggcgctgattaactaggatcaaaatctaggtcttttttctcttggcatcattgtctagacttccaggcttttggagctatattcacagtaattaagtgagaagacatgctcaaaatgatgccaaagaagtgaggtaataggtgttatctgcctgctgtttctggatttcatttggctctctgtttttttctgggagaggaactccttctatagcatataatatatagtagctgagatggtgatggtatatgatccactggttagatactttattgtctctggaaatactaagcagagttcttcactgaggagtattgcttgatcgtgatgcttattgttacaccacaattttcatcattagtaaaggatgagtttcaaatgatgaatggtcccaacacccatttttgctttatccagcttccgggaatcttgttttatttactaaggagaatttctctgtgttgtctcataattgttcattgactgactgctccagcctttgtaagctgtttttttatttattttttatttttagagacaggacctcactctgtcacccaggctggagtgcagcagtgtgatcatagctcactgcagccttgaccccctggactcaagcagttcttcaggtagctgggactgtatgcgagctccatgatggctgactaattttttaattttttgcagagatgggacttgctttgttgccaaggcaggttttgtttctaaatcctggcctcatacagtcctccagcctcagcctcacaaagtagtgggattataggcttgagccatggtgcccttctgagaccctgtctctacaaaagatgtaaaaaatactagctaggtgtgatggcacacacttgtagtcccagctacttgggaggctgaggtgagaggatcgcttgagactgggatgttaaggctgcagtgagctgggatcacaccattacactccagcctgggtggcagagtgagaccctgtctcaaaggaaaaaaaaaaacaaaaaaaaaacgaatgaagtttaatagtgatttttccttactacatatgcttttttttctttttgttaccttttgtgaagaatataaattctgagtttgatgcacacttgttaaccatgataaagtagaggaagctgtgaaaatttgctttaagaaaacatcacatttcattgttgaaatagatgagtatggaatttaatttaaaaaaagcaaaatgtatagtttttacactccccatggcccccactttgaaacacatcatgtccatctaaggcagtatttgagcttaccaggattctttagcatatcacaaatataaatatgaatattttataggcctttgtaacttttaatgacatttgcaaagtcatgttatttgtaaagtgtttaatgacaatatttgttgacacttttaaaaaaaagtagatttttaagaacttacacatattatcaacttaaaaaaaccaaatggaggatttgtcaccaaggggaccaactcagtgcagtcagtactgcaggtgtccaaacccacaccaagtccccatgtaccatgaatgcagcttccaaagaatcatggtaggcttttctaattgttgagatttattttaatgtgatacttgattggaagagtgttcagctcttttggtcattttttgtttttatttaaaaaattagttgcaaccatatttataaagcaaccttgaccaaatgtttttctaataggtgtttcatctctctctctctctctttctttccatccttcctttttttttttttttgccaaggtttcactctgtcacccaaactggagtgcagtgtgttttctgctcactgcagtctccacctcccaggctcaagctatcctcctgccttagcctcctgagagtagctgggactaactgactttttgtatttctttgtagaaactgggtttcctcatgttgctcaggctggtctcgaactcctgagttcaagcaacccacctgccttggcctcacagagtgctaggattacaggtgtgagccaccgtgcctggcctaggtgtttaatcttttatgcagtcctgtaacttaccttgaaatgtgcctaaagcagcttttatatgtttgattatacttctctttgtattgcctgtagccgaaaagaattccatttattttcttttgacatttctgtggttagtttttaaatgttgctgcaagagtgatggttaagtacaattatttttcagacttctcaccctaagttttacattctgtttggcaaattcacatggctggaacccacattttatctaagtattaattcagcactattacagcaagctaaagaattttgtaagaaccaaactgattgtgattttgtaagcatttctttacttctgttttatgtaggctcagtcttttgttgatgatgttcattttcacttaaatcctgtcaaaggcaaaaggtttaggattttgtcttttacatttgaacagctgtttcttttggatgcatcctgggagactcttgtttatttctctggctacctctcatctgttttaagaagtcatgaaaaactctgtcagcgtttttcttgccagtttacctcttgggaatatcacacttcatttatttcccacagatttgggggaaaaactcactttagtgccactaatttattttttatctggttgtgacattcagatttttagatttttatggttctgaaaattgctaattcagttcagctgcagagattagcatgtgtcagtaaattttaggatgagaaacagaacaggtaagttttaagaataatgaagaaattgtgcagtttgactcttcaatttaaagtgcttgtgatagttcctgcaaaaatgtatatgtgattcagagcgtgttgtgggggaagtgagcagacagaactctgagggaaagctcagcagagaggttaagtaccatagtagacatgtataatattgtcttgagtttagtcaggcaaatgggtatatatgtcttttcagatttattgtagtggacgggagcatgctgattgctgggagagaaatgagaagacaagcttgattcaggactgtttttataagggatcaaatgaaaaaatttacttaaaagtcacaaactataaaatgtagtgtacaaaggctagctatctttatagaactaagaactgtgaatttcagtgactcagcaatcaataaaaagtcaataacacacacatcttgtagatgatggtcattttaaattttctcaatgaatagtaaagagagattaacttagttatatttaaagcaaatagaatcaattaagtataaagaatgaatattataaattgatatatagaacgactattagaaaataaaaatgttgggctgggtgaggtggctcttgcttataatcccagcactttgggaggctgaggtgggcagttcacttgcgctcaggagtttcagaccagtctgggcaatgtggggaaaccccatctctacaaaaattagccgggtatggcggcgtgggcctctcgtctcacctgattgggaggctaaagtgggagcatcccctgagtccagaaggtcaaggctgcagtgagccatgcttgtgccactgcactccagctttggcggcagagtgagaccctgtctccaaaaaaaaaaaaaagaaaagaaaagaaatttgttataatttactcactaaaccaacaaactttttttctcagtgcatacatttatttacgtttttttccctctaatgtctagtcatgcttataatgtaacacgaagggctaagtctgatttccaagcttttcatcagttgatggacccttttctctgtgaagaatgatgaactctcaagctatctaaattctgtctcccttgtgtgtgtgttctctgtaaagtagtttgtttcatagaaaacccctaagtaggtgacatattgcagaaaccatgttgccaacattttgttatacttttcatgtaaaacatatttccatttctcttcactgccagtgtttctccagtttcaagtactacactatattattcaaaattctgtttattactccacatcttactactcttaatcaccatgaaaattgcccatcttcttttatagttcagtttcaaattttcacatgcctgtttagtgcagttgtcatagtcttagtaagaaataaattacactaaactatttcaaatggagaggatttttaatacatgaatttgttatactggctgaatgattaataagggggatgctgaggctgggcattgtggttcacacctgtaatcctagcactttgggagcctgaggtggaaggatagcttgagcccaagagttcgagatgagcctgggcaacatagtgagacttggtctctacaaaaaataaaaataaaaaggaggatgcggaggtaatctagagattaataactgcagaaagcagctgacatccctgagagaaagtcaggaaaggggaaatacaaagtaaatgtgataagacatctggactgtgaaacatattcataactgttaaaattaaaatgtagtcgaattaaatttaaaggagtttaattgagcagtgaatgactggtgcaggcatcccccagaatcacggcaaattcatagagactctaggggtaccttctgatcagaacaaatttatagaccaaaaaaagggaaagtgttaaaaaaaaaaatcagaagtgaggtacagaaacacctgaattggttacagggtgacgtttgccttgtttgaacactcagcagtctatgattggttgaagtatggctgctgggattggccaagactcagctgtttttacagctgcatactctttaggttttcagtcttgtctgccttttaagctgagttagggttcatccacagggactcagatttaaaagtacggagtccttctcagaccatatttagttcgctttaacagaactgtaataacaacacagttaaattatctcaattcattggtcaaatctcaactcaaattggtcaaaaaccaaaatctaggaatatgcatttaaacttgacacagaaagattaaaaacattcctctagactgccttcccaccccttcagataccagccatacgtcccggcctctggaacttttgactgactggcttcaatttggagatctcatgatcccctctttgggtttgataaatttgctggagcagcttacagatctcaggaaaacatgtttacttgtttattataaaggatatcacaaaggatacagttgaagagatgcctatggtaaggtatgggggaaggggcacagagcttctctgcccttccttggtgcaccaccctccagcaacttccatgtgtttggttacgtagaagctcacttaaccgtgtcctaggttttttggagacttcattatgtgcatgattggttaaactgttggccactggtgatcaacttgacctttagcccctctccttcccctgaggttgggggtccgactgaaagtcccaaccctctaatcatgcccttgtgatgatcaactctagctgtcagtcaacattagcatacaaaaagacagacgttggcgattctaaggtttttagaagttgtgtgacaggaatcaggatgaagaccaaatatgtatttcataatatcactgtggtggtgtcagaaactttacatgctgaggtgtgagcagagagagtgtatctataaaatgtttgcatgtcactaacgattattgatttagaacatcttttaaagtgcttattggccatttgtctatttttggagaaatgtctattcaaagccctttgcccattttttaattgggttgcttctttcgttgttgttgagttgtaggagttctttatatgttctggatatcaattccttatcagttatgtgatttatatatattttatcctatcctgtcaggtgccttttcactttgttgatagtgttctttacagaaagtttttaatttttggatttttttgagacaggtctcattctgtacaccagtctggagttcagggtgttggaaataactcactgtagcttccgtctctgggatacaagggatccccccagcttatcctcccaagtagctgggacgacaggcatgtgccaccatgcctcgctcacaagtttttaattttgataaagtctaatttatcttttgttgtctgtgcttttggtgtcatatctaagaaaacattgccaaatttgatgttctgaaagtttccccctatgttcctttgttggaattgtatacttttagctcttacatttagatctatgattcattttaaaaattttgtttttctgtgttctctcacagaatggaactatgattcatttgatttaatttttatgtatggtttaagataaaggcctggcttcgtttttttggcatgtggctatccagtttttctagcaccattggttgaaaagactgtcctttacccgttgaatagtcttggcacctttgtcaaaaatcatttgaccacgtatgtgaaggtttatttccgggctcttttcttttcattgctctgtatgtctgtctgtatgccagtaccatactgacttgattcttgtagctttgtagtaagttttgaaatccaggtttgagacgtttaggtttgtcctcctttttcgagattgttttggctattgggggacccttgagattccatatgaattttagaatgggcttttctattttcccaaaatttgtttttgggatttttataggattctgtgtatttaaaaaaaaatatgtttcataatggacacaacattctttttctaagtaggtgaagaaagcatcattgcttgagagtggaattaagatgtagtattcaccttaataaagaacttatacataacttttatagacactcccaagaactgggaatgttctagttaatgattcccttcgtaggtacttaaaaatctaatttgaagtcctagttctaagagaaacagagagagagaagaaagaaagaaattagtggagtaggaggtggtctgaattaggggtatatcaggacctagagtgaagattatgtctagtggtctcgtgtgacaaatgaatgagaactctggctagggatgttttagctgagatgtagaagaagaaactgacaggaaaccagagactatgtaaaggtgggagaaatgaggggaagaaattagtagagataatcgtggtggctatcagtagtaggtccagagagggtcctaaatagcagccattgaagtaggaagtggagagccagcattgcagacattgtagaatacttttgttgggaattcagtgaaccaacagcatctctttatcagtacactggtgcttttagcccacagtcttgggggaactggtcctgggattggagagaaaactgagttgtcatgctgtataagtaaaagctaagctttgaatagtatagttgcttttgagagaacacaagtagcctgtgatcaagctatcctattatgtgagtctattattgtcttctgaggggcagaaagccatagcatttcaatgttgaactaattataaagagtacaaaaatggtgatgatttcagtagtgtttccctgctccatatagtatcactgctcagaagtgagaaagagtttgatcagtggttttcatttctgccttcccacttagaatcacctgatgcctgggtccccttctccagagattctcatttaattgcttgggatgagcctaggtaatgctaatgtgcacccagcattgagacaaagctgtggaacagtgccttttccctcctctaatcccacagccgattaggaacagtgccttttgatacatattgcccaaatgatactttataggctttgtttgctgaggatggttttcactgaaaggagcaagatgcccccattttcagatcttatacaagcaaagtgaattgggctagtcttaatttagggaaagtagctctggtgattgagaagacatttctgttcagtagctaaaacagactgttacagcttttttacagataatatgctttgcatcgtggtctgtactcagaaggtttttacggtattgattttatatgccaatttattttggtgatagaaccaaattataccctgccaggtactatgtaattgactcttctgattcacccagaataagagtgggtgttttttgcttccatacaatcagatacgcctagatttaaagttatactatagtgttttcaaactgttaaaagcagccaaactgcttccccccatatgacgagcagtgcctgatccatagtaagcccctaaatagttgaatgaaaactagctgtaaatgaaattttccagaagtgtcactttttggctgtttgcagtgtggatgctttatttggcgcaatagcttttttttttttttttcctttttctgactggtactgttaattttgtacagttcagtaaaagtttaccagtacaagcttaacttaaaaagagccaaatactctaagccacccttagagaccttattctgtgagggtctgggaatcttaatattccagctgttctgtcattgtgaatcaaataattaagacttaattgctaagctggaaaagtcttttttaggatgccatgacagagatttaggtcttttaaaccagttcagtactatactgaatagagaatttcttactttttctgagtaggtgatctcattgtttagtatgaatatttctagaatgtaactcataaataagcttttattttattatttttttagaggtggagtctcactctgtctctaggttggagtgcagtggcacgatcttggctcattgcaacctctacctcctgggctcaaaccatcctcccacctcagcctctcaagtagctaagactataggtgcatgccaccacacctggctaatttttgtatttttttgtagagacggggttttgccatgttgcccaggctggccttgacctcctgagctcaagcaatccacctgcctcagcctcccaaagtgttgggattacaggtgtgagccactgcgcccagcccacaaataagcatttatatagagacatggtatggtggctaggtataaagaaataccatctctgtgtaactgattttaaatattaaggtgtttaaagaaaggtaatgagagatgatgattcatgctcttttttttgtactaacattacgggatctttggggtgtcacttttctggccagaaacctctgtggcctgtggcacctttgcctgagttcttgtcctgcgtccaggaagattgaggtatgcagacaagtgtagagtgtacaagatgaagaggagctttactgagtgtcagagcagctcagaggagacctgcagtgggcagttcctctctgtaggcaggtcatcttgttgagtgttcgactctcggcagagaggaggccctagagtgggtggctcctctcgtcagccaggttgtcccattgtctctgcagctctcagcagagaggaggcctgcagtgggtggctcctctctgcctttggtcgtcctgatgtctgttgctctcagccagagaggaggccctggagcaggtggcttctctctgtaggcaggtcattccagtgtttgcagctctcagcagagaggaggccctagagagggtagctcctctctacagctggtcatcctgatgtctctccttcctctgccctgctctggttgagcctgaggcttttatgggccttacaggggaggtggtgcatgccagttggtccgtgggcagcccagaaaaggcaccacaagtccccactctggtccatgggatgggtagcccacccctagccttcagaacctccctggcaaaaggtggggcctcactgaggactcgccccttctggcacaggagcccatttgcctcccaccactgcctatggcccccaggttacttgtgccaagggatgcccacaggctatcgctgaactgcccccctgccctatcttggccactctcctgtggtctttggcacccaaagtttggaggggccaagctggaagggacccagcgggtcagtgctgccctgagcctatgcatacctggctgggctgcaacagtgcccgggcttggccccaaccccaattggagaccagagcagatgctgggagtggggagaggccaggcagcaggagcagacacccctgagcctgtggtgacaggggctctcccaggcccctgagagcattgagaggcctgggcccacagccatgacctgagtggctggagctgtgcctggggagctcctgccctgccaactcaggaggggtgggactcctgcctgtccccggctgcagagtacacagccttagctgtgctccttctctgtgtcttcccatagccacggcaggtaaggtgcaggtggcatggtggccctggccagccctgcacaaatgaacctttggctcccaggacacggccagaagtgaggttgaggctgcagtggcctcaggcctgggagtgggtcctacccagctgtgccagggtgggggtggcacagttggcttccttggggacatgggcacaggggtcctactgctgctcctacagccactcctgctgccctgtcccgcctccttgccacctggggtggggctccaggccctcaccgggcctggactggcatccagggcaggggtgatgtcgttgcagggtccccctgcagccccagggctcccccttgcctggcttacgaccctgccagggtggcgcctctgggagcagattctgggcccaggcccagccaccaggagtgccaggctcagcagacaccctgacatggggcagatcctggggacacgatctccggtggtgccaatctgagcctactgccgaagtacgggaacctggtaccatcccagggccacaggccccatgtaccattcgccttggtgtctatacctgagcacctgtggcctgcagccgcaccccacctctgccagtgccatgtcagcagccactttgtatggtccatcactgcaatcactaagatagtatttcagtttacagagtattatgtgaaattggtttacttggcaaaattgtctcatactataattctgttttatagtgataaatatttttagagtttggttgatagaatggcatcacaaatacagctgttgaatgggtgatgaataatattaaagtgtacttcaatttgtgtagagtactgctcattaaatatctgtttttgaagtaacagagtaagaataattggatggtcgtaatgtagaataaaacacatactgtgacttaaatgaatgttttgagttgcttaaaacattcattaaaaaatttccaaaagttacaattaagtaagagcaatatttgtggtagataacatttaaaatacagccttttttattttcaagtactaatgtccctggtgttgaaaagagatcccattcagaaataaataatctctctactggagctcttcttgaagagtcctcaagtacagcccaacaattgaactgtgataaattcccagaaaaaaattttctttgttactttcagacagtctccctctgtcatccaggctggagtgtgttgtcataatcatagttcttgaactcctgggctcaagggatcctcccatctcagccaccctcacctcagcctcccaagtagttagtactacaggcacataccagcacacccagctaatttgtaaaatttttttttatagaggcagggtctcactgtattgcccaggctggtcttgaactcaccttagtctatcctccctccttggcctcctgaagcgctgggattacaggcataagctatcacgcgtggcctttttattcttattgatctaactagaaagattgatcatacagtattcccgatgttctcttcatcaccaccttcaaactataaactgtggaaaagaattttcagtttgctatagtataaaggctgcattacataaagtgaagtatgttttcaaaacagagacctggctgtgaatcacagttctatcacttactaattgtgagatctttcataaattgaaccttattccacgtggaagtcctgccatttgttcaatagaaataacagtgcctgcatcataggatgctaaataaatgttccttgcctgtcttttgttgcagtagctttggcgtatttaacttttttttttttaagttcagaattctagagaatgaattctttatctgctctgctgttaggtttcaatatcatgtttctggaactttttcttaactctttcatatcagtttatgatactttaatcatcattactgaaaaccagatgttactaataggtatttatatcatgaaatattatttcctaatattgttaaaagatttcattagtttgactcttaccgtatttattatgtgtgatttatttttcctgcattgttgtttaaaaaataaaaacaacaaaaacttacacatcaggtaaaactgatatatagagtagtttagaaatcccaggataaccactcagaaagtcatggtgattaccttgatgtcatctagaaacatagtgaggttactgtgtaaagttttccagaaatcattcagcagtgttagctgttaagcaaatattagagcacatgaaaaggaaaaattctgacttagtaggcatatctgttactagtttctttgagaagcagtccgtcattgtattatgatggatttgggaaagagttcaagtgctaaaatagttcataaggaaaagaattcatttctggtttatgtatgccagcttttattttgtgaggtggattatggcctcttgatcgttattctgtaccatattttcactcccttttttcactccgttttttttaaaagctatttttgttcataaactctgtagaattgtaggcagaagaaattacacatgacatctgatccattggtattgctttttgttagtaactcttcataaatagaattcaagatgaaaacatttgaagaacataacctgaaataatggtttggcctttctgaaaagtctggttttgcccagtcttattgtaaatcagtataagactttttttttttaatggctgaaacattttttcctaactaaatcaaataaaacaataatttttcatcttcaaggtagatatgaggaagaagatgaagagaggatgcactatctattaatatttggctagattaattgtatttgtttacattgaagtttgattcacatttatcccaagtcatccattagaaccatgctgaggattagatagactttgaattgtaatgtacattttttaatttattagatgagcagtgtcatgaggaatgaatagttctgccaaagataactaataattactatttttcacctttcatgcctatccttttgctggattttatgaggataaaaaattataagcaatcggcttgtctgcagggaaacatctgtgctataatttccagcgttaatggatatagtagaaaagttggaaatgatttaaaaagatgaagtccatggaggtttattttggtaaataggatttatgtgttttgatttctctttaaacctgtttttaaagctattttattgaatacgttttcttcctctccacctgaagcaacaaatagcaagattcttttagaggtccattcttaatacaactatttggatgcctggtatttgtagagtacatactgtatgttagatgtaaattgatttatttgggaaagaccaccacacaaagttattattttccttatgaactgccacttgtatatttaagtcatttgtttctctgagaagaatattctaaagtttatgtgactttgtattctaaatttcagaagaattaggagcttagtcctagaatcaagaaattctgcttctgctatttattagttatctggatatactttttattttataggggtgagattgcttgtagaatctctctctgctaacatcctgttactggactttttggcaagtcctttttgttgtcatattttttccttacacactttctttgaactcttcctccatctccttactctgtggaaatttatgtaacactactttccttagaaatccttccacttcaacattgttagtgttcttatattctttatatcttggaaggcaactcagcaacctcctggcccttcaccgctttctgtaggttgtttgcctgcaacccttgtgccgaaaatgcataaacagctctctctccctcttttttttttttttttttgccatcattcctcatttttctggacccattttctcattgtttgagaattttagtgtctggctcataatttacttttctgttttgctttctgccatccacaaagatgacttgtgacattcattgttgtgctgtccaaccattgcctgtgggctcctggatctaccctgtttgttgttgttgttgttgttgtgttttttttttgagacagtctcactctgctgcacaggctggagtgcagtggtgtgatcttggctcactgcggcccacacctcctgggttcaagtgattctcctgcctcagccacccaaatagctgggattacaggcatgtgccacgctgcctggctaatttttgtatttttagtaggggtggagtttcaccatgttggccaggctgatcttgaactcctgacctcaagtgatccacccacttcagcctcccaaattgctgggattacaggcatgagccaccacacccggctgatccttttttcttcccattctttgcctcccaatagcaactgtatatagacacatattcagcaatctatatggacacagtctagatctgcactgtccaatgtggtcgctattagagccactgtggcttttgagcacttgaaacatagtttctgcaaattgagatgttttgtaagtgtaaaacacaaaattaatttcaccagttttaagtttttctaatctggtgacctagaaaattttaaattacttacttgtgtggtttgtattgtattttttatatttttgttacgagcactggcctggacctggtctctactgatgtattagtccattttcagggtgctggtaaagatatacttgacactgggcaatttacaaaagaaagaggtttgttggacttgggctccacatggctggggaggcctcacaatcatggcagaaggcaagggagagcaagtcacatcttacatggatggcagcaggcaaaaagggagcttgtgtagggcaactcccatttctaaaaccatcagatcacgtgacacccattcactatcaagagaacagcacaggaaaagacctgcctccataattcagtcatctctcactgggttccccccataacacatgggaattatgggagcttacaagatgagatttgggtggagacacagagccaaaccatatcagctgagaactgctctgcctttgaattcttgaagtctaaaatttctccaaccagcccagtggctcatacctgtaattccagcactttgggaggttgaggcaggatgatcacttgaagcgaggagtttgaggccatcctgggcctcaaacatctggtccagcaaagcaagaccctgtctccacaaaaaatttttaaaaattagttgggcatggtgttttacacctgtagtctcagctacttgggaggctgaggtaggaggatcccctgagcccaggagttcatggctcactgcagcatgattgtgccactgtgctccagcctggcaacaaagtgagaccctgtctcaagaataaaaaataaaataataaataaataacatttttctgaccatagtctttgttcctttttcctatcccatgccagtcctgttatacctatttcacagcctacaaccttttaattctttaatccatttcttttctcaagatggcagcccctttctgccttcactttctcttatttacccttgatcctatcactaactactataactttatttttataaaaccactagttctctttgttttaaaaaaatcaaactaatggtttattttgtagtgatgaggtcttgctatgttgtgcaggcttgtctcaaactcctggcttcaagtgatccttctgccttggcctcccaaagtgttaggattacaggcgtgagccactgcacctggcccactagttcccttcccccccccgactcaatttctctttcttcccagttctcgtccctgaatctaactcagcaggtcttttcctctgttcttgctcccaggatggatggctctgctttggaaattccattacctgtgttcgtggagtctaattaaaactttatgattggggccaggcatggtggctcatgcctgtaattccagcactttgggaggctgaggcaggcggatcacgtgaggccaggagttcaagaccagcctagccaaagtggtgaaaccttgtctctactaaaaaatataaaacattagctgggtgtggttgtgtgcacctgtggtttcagctactcgggaggctgaggcatgagaatcgcttggacctagggggtggaggttgcagtgagccgggatcacgccactgtaccccagagcgagactttgtttgggccaggcgcattggctcaagccagtaattccagcactttgggaagctgaggctggagattcacttgcggcatccaggagtgagaggttacgatgagctgtgatcatgaactcccgcttgggcaacagcaagactgtatctcaaacaaaaaattaatgatttattaatacagctggtctaaactctatttaggtataatatagctacaacttagctgcttgataatctttttagtaatcactaattgactttcagtcatatcctgaactgtgcttacttcagtactaggttggtcaccaacagctcgacaggccatacactgtatatagcttgtgaagttatgtatcatgagtagctctgcttcaccttgtctaattctgctgcttactgtttgttgaaacacctgtgttttacaatttattatgacatgtttaagcttataaaagtatattgtaacgtgtttggtttgaaaggataatcataacacaaccaaccaccactcaccttaagtcgattatcaatatctttgaagccactctgtattcctcctttatctcagctgcctctttctccctagtggtaacaattatcctgagttttgtataagtagatatttgttttataatttcactggtgtctgcattttgaggtttacattttgaattagccatcatgtgtgaccttgggcaacttactttattatctctgaacctttctcttttttttcccaatttaaaaaattgtgttaaaatgcaaatagcacaaagtttaaaatcttaaccccatttttaagtgtacattttaagtatacattgataatatgcagtgatcacacgatccatctttataactcttttctttcatcttgtaaaactgaaagtctatacccattaaacaataacttccctttgacccctccctttgcaccctggcaacagccattctcctgtctgtctgtggctttggctattctttaactacatcatataactgttatcatacagtagttgtttgtgcctggcttatttcacttagcatattgtcctcaagttccatccattttgtaggatatgtcagaattccctttctttttaaggctaatgtttcactttatctatggtaccatattgtgcttatctattcatttgctgatgcatacttggttggctttcatgttttaccagttatgaataatagtgatatgaatgtggatgtacaaagaactcccttaagacctcgttttcatttatttagagtggatacttggaagtggaattgcagaactgtatggttattcctattttttgtgaaaatgccatactgttttccacaatggctgtacctattttacattcctaccaacagtgtgcaagagttccactttctccacatcttttacaacacttttccttttttttgagatggagtcttgctgtgttgcccaagttgaagtgcagtggggcgatctcggctcactgcaacctctgcctcctgagttcaagcgattctcctgcctcagcctcccaagtatctgggactacaggcccgtgccaccatgcccggctaattttttgtatttttagtagacacaggctttcactgggttagccaggatggtctcgaactcctgaccttgtgatctgcatgccttggcctaccaaagtgctgggattacaggcacgagccactgtgctgggcatggtggcacgcacctgtagtctcagctacttgggaagctgaggcaggagaatcacttgaacccgggaggtggaggttgcagggagctgagatcttgccactgcactccagcctgggcgacagagcgagactctgtctcaaaaaaaaaaaaaaaaattgtatgtgtgtatgtacacatatatatactagccatcttggtgtgaggaggtgatatataccaatatagtattgatttgtatttccttaggattagcatattttcatgggcttgttggccatttgtgtatgtctttttaatagaaatgtctattcgtgtcctttgcccatttctgaatctgattgtttgcttttttgtgattgagttttaggagttctatatattcaggatattaactttttttttttttttttttgagacagtgtctccctctgtcacgcaggctggagtgcagtggtgcgatctcagctcactgcaacctccggcctcctgggtttaaatgattatcgtgcctcagccacctgagtatctgggattgccattcctggctcatttttgtatttttagtagagacagggttttgccatgatggtcaggttggtctcgaactcctggcctcaagtgatttccccaccttggcctcccaaagtgctgggattacaaacaggccatggtgcccagcccaggatattaactttttaacaggtgtacagtttacaaatattttctcttcttctgtaggttgcctcttgactctcttggtgtaatatctttcgatgcacaaaaattttaaattgttaatatgcccaagttgtctacttttttttttttttgcttctgcctttggtattgtatctaagaagtcattgccaaatccagtgtttcagagcgttttctctctgatttcttctcagatttttttacttttagctcttacattttggtcttaatctattttgacttaatttttgtatttggtgttaagtgagggtctaacttcattcttttgcatatgtatatctaatttctcccagaaccatttgttgaaaatgtcctttccccattgaatggttttggtacccttttcaaaaatcgtttgaacatatatttgtgggtttatttctgggccattttttcccatttctaattacttttggtttatttttacaccagtactgcacttttcatttttgcagatttgtaattttgaaatctggaattgtgaggcctccagcttttttcttttcagctattgttttggctatccagacttccttgagaatacatatgaatatcaggatggggagtttttctgtttttgtagaacacaccattgggattttgatagagattgcattgaatctgtaagtcactttgggttgtattggtatattaacaatattaaatcttccagttcatgaacaggggataattttttgttattgggtttttaggttatctcatccactctcatggcaaggactgttggttatgtttgctgattcttagttcattctgggttgactctgctctcttcatgcctaattactctgtagacttttgtacctagagatctctttgacattaaaactctccataatataaatgaattcatcacttttttattcaaagcagagaaaacaactattgcagaagccttgagagaaaaaaaagttgatatatttgagagaataaaataaggccagtatggctggacagtaatggtatgtgaagtgaagtcaatgatagcctgggacccaatcattttgggttctgtaagcattcttcaccatctaatcctcaaaccttggagaagcagctttcttccccttatatttaggtgctcagaaaatcctgctgtttctataatatatgaattaactcccaaatctgccttttttttttctgtcgagatccactgctgttatcaggcccttatcactatgtacctgggctgtcggaatagatccctgtttgatatcttgacaccagtatcttcactaagagttcatattgttgtaatggctctcttttttaaacaaattggatgatatttctgccctgttcaacatctcctaggattaccttcatggcgaagtccttacttgacccgtctttttagtctggccctaatctaatcctctgatgtcacctcctctcactctacctcatgcacttctattctctggcattactgacgtgtttatggttcagcagacgtgccctagtttttcaggtctttgtgcttctgtttaaaatattccttgttttgcctacacatgatctcctctgctttttatggctgactgcaagctcaccatctatcactgttgatctgccacctttggaggctccctggaactcttctcccaggaagaattaatcacattctgctctgtacttcttgatatattattcatactccttacaccactttctttttttttttttaaatttatttttttattgataattattgggtgtttctcacagagggggatttggcagggtcatgggacaatagtggagggaaggtcagcagataaacaagtgaacaaaggtctctggttttcctaggcagaggaccctgcggccttctgcagtgtttgtgtccctgattacttgagattagggattggtgatgactcttaacgagcatgctgccttcaggcatctgtttaacaaagcacatcttgcaccgcccttaatccatttaaccctgagtggacacagcacatgtttcagagagcacagggttgggggtaaggtcacagatcaacaggatcccaagggagaagaatttttcttagtgcagaacaaaatgaaaagtctcccatgtctacttctttctacacagacacggcaaccatccgatttctcaatcttttccccacctttcccccctttctattccacaaagccgccattgtcatcctggcccattctcaatgagctgttgggcacacctcccagacggggtggctggctgggcagggggctgacccccccacctccctcacggtcggggcggctggccgggcagaggggctcttcacttcccagtaggggcggccgggcagaggcgcccctcacctcccggacggggcggctggccgggcggggggctgaacccccacctccctcccggatggggcggctggccgggcgggggggctgacccccccccacctccctcccgggacggggtgactgccgggcggagacgctcctcacttcccagatggggtggctgctgggcggagaggctcctcacttctcagacggggcagctgccgggcggagggtctcctcacttctcagacggggtggttgccaggcagagggtctcctcacttctnnnnnnnnnnnnnnnnnnnnnnnnnnnnnnnnnnnnnnnnnnnnnnnnnnnnnnnnnnnnnnnnnnnnnnnnnnnnnnnnnnnnnnnnnnnnnnnnnnnnnnnnnnnnnnnnnnnnnnnnnnnnnnnnnnnnnnnnnnnnnnnnnnnnnnnnnnnnnnnnnnnnnnnnnnnnnnnnnnnnnnnnnnnnnnnnnnnnnnnnnnnnnnnnnnnnnnnnnnnctcggcactttgggaggccaaggcagacggctgggaggtgtaggttgtagcgagccgagatcacgccactgcactccagcctgggcaccattgagcactgagtgaacaagactccgtctgccatcccggcacctcgggaggccgaggctggcggatcactcgcggttaggggctggagactggcccggccaacacagcgaaaccctgtctccaccaaaaccagtcaggcatggcggcgcgtgctgcaatcgcagttcggcaggctgaggcaggagaatcaggcagggaggttgcagtgagccgagatggcagcagtacagtccagctttggctccgcatgagagggagacgtggaaagagagggagaccgtggggagagggagagggagggggagggggggagggggaggggagggggagggagagggagagcccttacaccactttctatgtcatttttactgttgttaggtaaattgtaaatccctgtgcataggaatcgtgtctttttcaacttgatttccatgacttagaattgctactgcaaacaaaaaagaaaaactcacaaacttgttagattgctacatctgaagtcaagtatagtttgagagtttttttcattctaatgtgagtaaaagtttttgcgtgcctaatgtttttaactgagggtactactaattagcatcctcgaaggaaagaaaactgaaagtgattttgctttaaagcttgttattcatagtaaaagaacatttaccatgtaattcagggaagctttagaaagaaaacctaggggatctgttggccatatcaaaaaagtacaagctacatggacagtgaggtgatactgtaatacttccacctgtaggtcaactggagagacttggttttttccaaatagacctagcttaattgtgatgacgcatgccaacctaattaacctcctaatgttacttgtctttgtttttgtattgtcaggaacttggtgtgtgggttgggaatattagaacataatagaactatgtgatgtctaaattgagctttaacacaaactggttggtgttattgagggaaagtataacttattagtgggaatgggaaaagaagcctgatgttgtggtgaggtagaaatttccactgtgttactgtgaacaggaagtaaagggctaatggtcggtgactcagctgttttctgaacctgtctcatatgattcagtgtgcatgatgtctgtttattctcgacagagtaagtactacgggagtcacattacacaggcagacataatgtttatttaaccaactcagtgatgacctaaaaataacttgtggggtttttgtactacatttagcataatcagatagaaaaatcataatggacacccatcattgagtgctttcccttataaataactggatatatagtcagccagtactatttcatttcttacattgttaaggtgcaatctttggtatttaaatgaaaggtagcaaaagaagatagcctttaaattatccataaaataattctgtaccattttagattatactttggacagatatgcattttcggtgcttagtgccatcgttgaggtatttttgcaccaaaattttcatataggaacctttttgtgaggctatagcaaatgttgttttgaaatagaaatttacgtatttgctggattttatgttaatattaaattatagtagcaatagttttactttgattttcttgatttattcatcttgtactgaaggtttgtgcctaccatgtactgtaattgagtcttaaatatgtcagagccgggcacggtggttcatggctgtaatcccagcactttgggaggctgaggcaagtggatcacctgagttcaggagttcgagaccagcctgcccaacatggtgaaatcctgtctctactaaaaatacaaaaattagccaggcattgtgctgcgcgcctgtagtcccagctacttggaaggctgaggtaggagaatcgcttgaacccaggaggcagaggttgcagtgagccgagattgcacccctgcactccagcctggatgacagagcaagactctgtctccacataaagaaaaaaaaagaaagaaagaatcttaagtatgtcagagtatggttactgttatgctgtatacctgttacatgcttggctttgaaggagagagcacttggaagcctgagcttacataataatcataatctgctcattgtctgagaaattgtgagttgttatggtttattctttttgacatttgagtattcttgctctcagaggtgcagcatttgtagcatataaactttaatcagagattatttcaaaagggaaagggaagctagagtcactaagaagaaataggctgggcacagtggtttatgactataatcccagcactttggggggctgaggtgggcggatcacttgaggccaggagtttgagaccaatctggccaacatggcaaaacactgtgtctactaaaaattcaaaaattaactgggggtggtggtgcatacccatagtcccaggtattcgggaggctgaagtatgaggatggcttgaacctgagaggtgaaggttgccgtgaacaaaggtctcaccactgcactccagcctggctgatagagggagactctgtctcaaaaaaaattaaaataaatacataaataagaaataaatgccagcattctttttacaataatgctttatgtagtgggaatgtgtgatcaatctaatagtcagtagaactacccagtggttgatgctatatataaagtaggaaatacgtaccctttctataattgattttaaaagtttctgcattaagcttacactcttttatttcactccatgtttcagtaaaaatcacaggacttgtttttatttacaatattataccattgtttgaatatttaatgggatttatattttaaaatgttttagttggtatagttattagatattctgtattaacctagaatggaaaattaaagtatgtatcttctgattcactgcatgtaaataggacctgacttggacatcgtttgaaatgtattccagtaatcgcgctggctatacatggtcccatacctgcccttatcccaacagataaatggtattcttctttatttattcatttatttatttatttatttttgagacagggtctcactctgttgcccaggctggagtgcagtgacatgatcttggctcactgcaacctcctcctcctaggctgaagcagttcttccacctcagccttgcaagtagctcagaccacaggcatgcaccaccatgcctgggtaatttttaaattttttttgtagagacggagtcttgctgtgttacccaggctggtcttgaacttttaagctcaagcaatcttctcacctccgcctcccaaagtgctaagattacagatatgatcactgtgcctggccccgcaaattggtcatttctgatggttgtctgggcctcaaagcctgagttcagcatagtgttttggcacgttgcaaagaataagtaagaaaatgttgttaagtggacgcaactattccacatgggatgatgttagatttgaagaaggaaaaagtggttcctcaattcctttcagattggcagttgcaatagtaacagaaccctcattgacatgaagagccaatgttttcctgtagtagaggaattattttcttgttttatttaattatttatagtgtttcttgattatgttcatgggggcattttgttttgttttgttttgttttgagacggcgtcttgctctgttgccaggctggagtgcagtggtgcagtctcggctcactgcaagctctgcctcctgggttcaagcgattctcctgcctcagcctccctagttgctgggactacaggcatgtgccaccacgcccagctaattttttgtatttttagtagagacagggtttcaccatgttggtcaggatggtctcgatctcttgaccttgtgatccgtctgccttggcctcccatggcatgttgtttttaaataacttctcttgctctatgagatgagaaaatatgtattctgtttgggactttcttactctccctcgataataaaagataaaaatttttatttttcattcactgaaacataaaaaaggcatcatgttttgtgcagactattaaatgttgattttaagatctgtgttggatggttttatatagctgtctaccatttatgagtttcatgtggaatatactaccatatcaagttttcattgtttaaacagctctactttgtcaagtattgtttacaattcaacaagaaacaagcaagcatttacaaatatacgtgcaaatatgtattcgtctgacaaccaattagtgaaattgaataagtgctcttgaaacaaacttgtttgatatcaagcttttgtgctagagtaatattgttgttttgactactttaaaagtgtttttatctggatgtggtgactcgtgcctctagtcccagctacttgtgaggctgaggcaggggaagatcacttaaacccaggagttctaggctgcagtgagctatgattgtgccactgtactccaccctgggcaacagagtgagacctgttctcttaaaaaaactttttttcagttgtggtaaaatacacaaaatttaccatctttctgagatcatttgctataaaggaatacctaagtctggattatttgggggtaaaaaaaaaaaaagagctttattagtctcatggttctgtaggctatacaagaagcatattgccagaccaacacctgcttcagataagggcctcaggaagcttctactcatggcaaaaggtgagggggaggtgtgttcagagatcacatgatgagagaaccaggtgacaggctcttctaaataaccagttcttaagggaactaagtgagaactcactccagcaaggatggcagcaactcattcatgagagatcaactcccttaatccaaacacttcccattagactccagctccaacattgggggtcacatttcaatatgagatttggaggggtcagtattcaaccatagtaccaccttaatttttttttttttttaagagaaggagtctagctctgttgcccaggctggagtgcagtggcgtgatctcagctcactgcaacctccacctcctgggttcaagcgattctcctgcctcaacctcccgagtagctgggattacaggcatccaccaccatgccctgtatttttagtagagactgtgttggccaggctggtcttgaactactgaccttgtgatccgcccgcctcggcctcccaaagggctaggattacaagcatgagccactgtgcccggctcaccttaaccatttttaagtttatagttccgtggcattaagaacatttacatttgactgggcacattggcccatacctgtaatcccagtatttagggatgtcagtacaggggcattgattgagcccaggaatttgagaccagcctgggtgacatagcaagaatgtgtctctataaaagattttttttttttttaattactgggcatggtggcacatgcctgtagtcacaactacttgggaggcagaggtgggaggatcgcttgagcctgggagatcaaggctgtggtgagctatggttatgccactgcactccagcctgggtaacagagtgagaccttgtctcaaggaaaaaaaaatatgtaattgtcaacactgtgtatcttcatacctcttttcatcttgcaaaactgaaactttttgtccattaaatacagatctagtgtcccttatccagaatgcttgggaccagaagagttttggatttcagatttttctgaattttggagaattacattatttacaggttcagcattcctagtctgaaaatctcaagtgctccaatgagctttttaaatttttttgtttcatgccaactctcacaaatttacagattttggagcatttggattaaggacactaaacttctttttttttttttttttttttttttttgagacggagtcttgctctgtcatccaggctggagtgcagtggcacgatcttggctcactgcaagctccacctcctgggttcacgccattctcctgcctcagcctcccgagtagctggaactacaggtgcccgccaccacgcccagctaattttttgcatttttagtagagacggagttttgccatgatggccaggatggtctcgatctcttgacctcgtgatccacccacctcggcctcccaaagtgctgggattacaggcgtgagccaccgcgcccggccaaggacactaaacttctaactccccattatctcctctccccatcccttgccaaccacaattttattttctttctctgtgatttgccatggtgtcggtacctcatagaagtggaatcaaacagtatttgttttcttgtgactggcttatttcatttagaataatgtcctcaaagctcatccatgttgtaatgtgtgagaactcgcttctttttaaaggatgaataatatttttttgtatgtatgtgccacattttgcttgtccattcatctgtcagtgaacacttgggctgctcctacctttttagctattgtgaataatgctgatatgaacatgggtgtggaaatatttattgttttgtttcgttttgttttgttttttaaatgagagtctcgctctgtcaccaggctggagtgcagtggcgtgatctcggctcactgcaacctccgcctcctgggttcaaatgattctcctgtctcaggcccccgagtagctaggactacaggtgcacaccaccatgcccagctaatttttatattttttagtagagatggagtttcaccgtattggtcaggctggtcttgaactcctgacctcaggtcttgaactcttgaccacctatctcgggctcccagagtgctgggattacaggcatgagccaccgtgcccgtccttttattgtttttttttaagacagggtctcatactgtcacccatgctggagtgcagtgacgcgatcatggctcactgtagccttgaccttcagcctctggagtagctgagactacaggagtacatcaccacacccaactaattatttatttttggtagagttgagtctcacagtgttgaccaagttggtctccaattcctgggctcaagtaatccttccacctccacctctcaaagtgttgggattacaggtatgagccaccacacctggccacaagtatcttttttaagagtctgcctcatttcctcccttactgccttttgttgtgcttagttgagtttttgtagtgacacattttgattctctttttgtttcattttatgtgtagtctacagaatttgtttgggatgattatcagagggatttcatgtaaaatcatgaagttataaatatgtattttaaggtgataataatttaacatcagttggttacaaaaaccgtacttcttttcacctcaggcctctccaactttgttattgatgtcacaaatcgcatctttatatagtgtgtgcccttagatttttatgcttttgtctgttaaaatcctgtaaaagaataaaaactggacttatgaaccaaaattttaataatagaggcttatatatttgtccatgtatttatctttgctggagaactttatattttcatacggtttttagttactgtctagttccctttcttctcaatttgaagaatctttggtcatttcttgtagggcatgtcttatggtaatgaactttctcagcttattaatttcattaatttaaaatttgggaatgtcttaattcttccctcatttttgaattaaaattttgctggatatagaattctcatgtgatagggttttttttttttttttttctttcctttcagcatgttgaataatgtcattctactaccttctggtctgcaagtttctgctgataatcttattgaggatcccttgcttgtcatgattcagtttgatcttgctgctctcgaaattcttttccattgttttttaccttaaaaatttgttttttgtatagacaggttcttgctgtgttccccaggctgttcttgaactcctgtcttgatccctccaaagtggtgcaattacaagcatgagccactgtacctagcctgtcttttacttttgacattttgaatatgtgtttccatgtgggtctctttggttttttttcctatgtggggttcattgagtatcttgctatcatatatccatgtcttcaaatgtgggaagttttcccccattattttttttgaaataatctttctgttccttttcctctctcttcttctgtaatgtgaatattgatttgcttgatggtgtctcataagtcccttcggttctgttaccttttctttattctttttaatttttgcttctcagactggattatttcaaataacttttcattaagttcactaattctttgttctgttattagagactgcttttgtactcttctagtgaatttttcaattcagttattttttcagctccagaatttgtttcttttcttccccccctccttttttttttaaactatttctatctctttgttaatattctctatttatgtatcttttttctgatttcatttaggtctctcctcccccccaccacctttctttagcttattgagtgtatttaggacagtttaaaagtctttgtctagaggctgggcatggtggctcacgcctataatcccagcactttgggaggccaaggcaggcagatcacttgagatcaggagttcaagaccagcctggccaacatggcaaaaaccccgtctctactaaaaatactaaaactagccgggtgtggtagtgcatgcctcttatcccagctactagggaggctggggcaggagaattgcttgaacccaggggacagaggttgcagtgagccaagattgtgccactgcactccagccagggtgacagcataggactccataccaaaaaaaaaaaaaaaaaaggtgtttgtctggagctgaaagccattatcctaactgaactaacacaggaactgaaaacgaaatactgcatcttgtcacttacaagtgggagctaaacactgagtacacatggatgcaaagaaaggaacaacagaccttggggcctacttgacgatggatggtgggaggagggtgagaatcaaaaaattgcctaccagatactgtgcttattacccaagtgacaaaatatctgtacacacgcaacccctgtgacacacaatttacctgtttaacaaagctgcacatgcactcctgaacctaaaataagagttaaaaagaaataaaaaccaaataccccaggaacttgtctttaacttttgaactgggccagacaaccacaatcacaacatccttgaaaacagctgaattatgccagcgcctccaccggtgataattctttcagaacaacaacaacttgttttgttttgagatggagtctcgctttgtcacccaggctggagtgcagtggcatgatctcggctcactgcagcctccacctcccaggttcaagcaattctcttgcctcagctcccaagtagctgggattataggcacccaccaccatgcccagctaatttttatatttgtagtagagacggagtttcaccatgtaggccaggctggtctcgaactcctgatctcaggtgatccacccacctcagcctcccaaagtgctgggattacaggcatgagctactgtgcccagcctatttctatactttatgatatttgttcaaagtcgagcacttaaatagccagctgttctaatctttgtggactgattccatgatgggtaacatcaggagtatcagcctggtgtgaaggcttaaggtcttgttgaccttttctgtgtttgtatattcactgggcctatgtgaacacttttccccagattcctgggatgtatcagtgcttttagctgccttgatctaagagtggcatgttagatgttctgttgtgttcctctgccctttgtcttttgtccctctagcactggcagatcggtgacatccctgtagctctcaactaagccactcttcccatccgaactttgcatcaggtgaaacagtaatcagtcccatgagcagcacccccagacaagccagaacgatgcaaacaagttccactcttttccttctgtcatgatggagcatcttagaattaggtggattcctcccaacttggcctcaatgaggagggattggagcaagggcaacctctaaatatacatacatatatacattaaaaaaattttttctgtggctgccttacaaattattgttctttattttaatattttaaaaaatttcctatattgttttgagtgtggctttttctcgatggggcatttagttggctgccgcagattcttaactgcttgagagagtttgcgtctggttgaaattattacacagttgagttggcagcttctttcacactgtgatccctcccagattctgccggcttccttccctgagggcccctctgagatatagtcagggatagcttccctggactctagctggagaatgtgagtgcttacaaagctcttcttgctactgcttctactttcatattccgcactaaatctgctttagttctaggtaaggttaaatccttctcctgtaatctggattttcagttttttcagtgggaatgtgtgttcggaggcgggttttcctgcttttacacttggggaactcacggtttctcacctgtcttgtggaatttacagcggcgtgccacttcttttagaggatctgtggattctttctgttttcccgatatgttcctatggtggttcttggcacaaaagtccatggtgtgaatctccacatgttgttctgtccatccaagtgggagctgcacgttaatcctgtctcctatccgccatcttcctccctactttttgttggtctggacagggagcttgtttgttcagtcacaaaagtttattctttgtgaatcctattggcttctgttctccagttctccaggttcttaccggtttcttgagtttttacaaaggtactttggtcggtatgttgttcacttggtgttttcattgggtgatgtggacctggatcatcgtagtctgttatcttggtgatgtcctgtgtttttgaagcagatacacatgtttttgaagcaaaaagtgtcctgctttatgaagcagatatgcatcaatagaatttttgctacttctcttatttcaagcattttattgcagtgggatttgaaatgtgcactaattatacagacttggggaaaaaatttctcatgaggttgcaggtgcctctaagcaatgtgaatggaaaaccattttagggtcacaataaaataatgtgccatacctgtggaaatatggaatagtaaacgactgtcccgaaacccttaggaatgagaatgttggatttttttttaagacaaaaacttaaggatggataatgtaaatgtttaataattaaatagcaagaggtaaaggaggaaaacttttagttctaatatcaatataggccagtgttctcaaacttttatacttcaggatccctttatactcttaaatagaactctttgggcttctcaatcctatgtgcattgtatctactaataaaaatgtctgccacatacccatgtgtataagcatagtttatccttctttcaagtaaaatggcattgcaagaaaaagtggctagttcagtttataactctaatggtgttacaagtgcttttccttagtactactaatttacctctgaactgttttatgtcttctcacttgatcaatacagtatactaaaaagacatgctaaattttgttagtttactgttttatttatataacattctttaaatgaccaaattatagagatggaggataaatttgtggttgtcaagggagaggagtgaggcaagaaggaagatatttgtggctattaatagggtaggtagggtagggtaataccacagatccttgtcaaggaatattttgtattttgactgtaatggtggttatatgaatttatacatgtgataaaattgcatagaactaaatatacacacagatgtgcatgcatctgtagtgaaactcaggaaatctgaataaggttgatggattgtatcgatgtggtttttctggctgttgtactgtactgtagttagatattaccattagggaaactagatgaagagtatatgggagctctgttttatttctcaaattccgtgtaaatctataattatttcaacttaaaaagtgatacattctgttacagaagtgacattcttttgtcaattacctgtagaataagaaaaattgaaaagttaaataaagaagtgacattcttaagaactggcttttttttttctttccttttttttttttttaaaaaaagtttaatttgtcgtgaaggcttagggatgaagaatacaatgactatcattgccttggttttcactaagtatatgtaagatttacttagtgaaatctcagatttcctgagtatatatttaagatttactagtagctacatccaccttgcttttctatcattgttgaaaatatcagcacaggcctgtgacatcttagtatttattttacgaaaatatttcacctcccacacctgctttaatagcattacagagatgcccaggactctgtggaccacactgtgataatcagtagcttaaagcttcagtctttattagctgaggaaaacaagtgctatgcttaagactgtgtaggaaattcagtgataggtctctgtcactgtctccagcgttttatattgtggtcttgtttgttggatattattgtacttctatgaaagtagagttgcagaagtttagagtgatataaaatatagaactcataaaagcaaaacatgggaattaacagtttgctatacctgtgttgtgcagtatgttagccatgggctatgtatgtggctatttacattctaaggattaaaatgtatataaatacaatttaaatggaaatcagtggttatagagtttgttttttgcaagaagaaaaagttctagacatctgttgtactatgtgcatatagttaacagtactgtatacttagtggttaagatagtaaattttgttacatgttttcttttttcttttctttttctttctttttctttttcttttttttttttttttttgagacagagtcttgctctgtcacccagactggagtgcagtggcactatctcagcttactgcaaccttcgcctcctgggttcaactgattcttctgcctcagcctcccgagtagcagggactatgggcgcacagccatgcctggctaatttttgtatattggccaggctggtctcgaactcctagacctcgtgatccgcctgccttaactttccaaagtgctgggattacaggtgtgagccatcgtgccaggccttgttacatgttttctaccacaaaatttaaattgaataaaattcatttaaataaacatttattttttcagtttcatcagtcacatttcaagtgttcagtagccacatgtggctaatagctaccattttagagagagtaaatatggaacatttataattatcccagaaagttctatttgcattggttgtgtagcacttaagaagacagttttcagctgggtggggtggctcacgtctgtaatcccagcactttgggaggccgaggcgggcagatcacaaggtcaggagtttgagaccagccttgccaatatggtgaaaccccgtctctactaaaaatagaaaaattagcagggtgtggtggcacgcacctgtagtcccagctacttgggaggctgaggcagaagaatcccttgaacccgggaggtggaggttgcagtgagccgagatcgtgccactgcactccagcctgggcgacagagcaaaactccgtccccccactacccccccagcaccccccaaaaaaagaagaagaagacagttctcaagaggttgaaggtacttggtctggactttaaggtgctatttttgtttctctggccagatttaagtgtcaaacatttgttaggtgaacgagtttctctcaattaatttgtaccctataatatctactaatgagaatgaacggggctggatgtggtggctcacccctataatcccaacactttgggaggctgaggcaggaggattgctagaagccaggaatttgagaccagactgggcaacattggcaagaccctatctccacgaaaaattcaaaaattagtcaggcattgtggtatgtgcctatagtcctagctacttggaggctgaggcaggaagatggcttaagcccaagaggctgaggctgcagtgagctgtgttggtagcactgcactttagcgtaggtgacagagcgagaccctgtctccaaggaaaaaagaagaaaaatgaataaacacacttatatatgcataaagagaagtttataaagagaaattttaaagcaaaattaagaacttgtataaattaataggaatagcctattttaaaacttattggtatagctatgtagtcttattcagattttaagattttaagtctttaccagctctaagatgatagagatagatttgcatctagcccctttacaatttcaaattttacattccaacattgtaatcaatctggaatttcttttggtataatgagttgaggatggttaaccacctttcttctaaatgattatttagttttctcaacacaatttattaattttggtatttttctattaatttgaaatgtttctaatacattctgcatatatgtgggattatttcagcattctctgtattactcattccatgtcattaaatgttcttctgtatcttttttaatgactgcaaaggattatacactgtggctgagtaagtgcttcttacatctatatctctttattgatttaataataaatttcttaaagattaagtagccagggcgcagtggctcacgcctataatcccagcactttgggaggctgagcccggtggatcacctgaggtcaggagtttgagaccagcctgaccaacatgatgaaaccccatctgtactaaaaatataaaaaaattagccgggcgtggtggcatgcatctgtaatcccagctactcgggaggctgaggcaggagaattgcttggacccaggagggggaggttgcagtgagccaagattatgccattgcactccagtctgggtgacagagtgagactccgtctcaaagaagaaaaaaaaaaagattaaaataagtgaaacagtcatctatcttaggccttatttacgcacatagcccacagcacagtgttttctttgtgctagatttctgctaatgctgttgatttaatttttattatcaaaaattatttagaactctataaaatagcagacttcctactggatattctggtttgctttgtattttgtttgtttgtttgagacaggttctcactctgtcgcccaggctgaagtacagtggcacaattacagctcactacagcctggggtcaagtgatcctccagtcttggcctcccaaagtgggattacaggcatgagccactgcacccagcttgcttggcatatttgtatttcatgcaggagaagctggaggacagaggttttctttattaaatttttattataaaataatcctactgaacattggaaagtaaaaacataatacagaagtatataaaataaaacctataagttgtatcctgtacactctttataaccgtctctgaagtagtcaatttaaaatttgctacatattttcttaagacatttatcttccttggttgttgtgtgtactatgtgcatatatatagtttttaaagttaagacagagtctttttatacttaaaaattctacaatttgcttttgtcacttaatattattatggacatctttccatgatgtatgttgacttgattcattctaaagattattctaaattctctcagtgactaagtacataatctcaccttttttatatatagacatttagaatatttccagtttttttgtttttgagtgtgttttttttttttttttttttttaaggaggggcccattgtgaatatattcacatagtgagctccctgaagtggaatcatagaatcaaagggataagcatgtttaaaatgtggtcagtattaccttacagttttttgttttgagatgaagtttcgcttttatcatctaggttggattgcagtggtgcgatcttgtttcactgcaacctctgcctcccgagttcaagcaattctcctgcctcagcctcccaagtagctgggattacaggtgcccaccaccacacccatctaatttttgtatttttagtagagacgaggtttcaccatgttggccaggctggtctcgagctcctgacctcaggtgatctgcctgtctctatctcccaaagtgctgggattacaggcgtgagccaccacacctggtaccttatacctctttgaaaatttggcagcttagttttttagtcagatttatgtttgttcacatacagtgtgtacaatattgagtttaatctttatggctgaatttagtttaggtgatggcagaatcttaaaacgagaaatggcatttcatctctgacttatatgtaaagtacttagaatagtacctgaaacctagtaaaagctgtataaatgttttatgttataattatttttgttagcttatgtccattgtactacattgtgaaaataggaaatacagattaattttttcacatgtctatggtttgaaaaccatcacatctggagtcttgttatacttgatatgctgtgtttgttttgtcttataatggaattcaccatttctgcctgtggttgactgtccaaatcactgtttttaacatcatcattagagatttaagggttatatgtacaccataaggactgttctcattggcttttcttcagtaacattattaatttacatcatttgcttggtttgctgtcactattgtgttcttatctccccaacaaataaaaagcattcaaaaaggtttattgaaacataaaattaataatgaaagtgagaacagatgtctgtaactcatcaacttggacagtatactggattgcagagtaaattctgtatgttcacccatatgtccttgaagaagtaaatatttgggatgactttgaaattattcgaaaagggaaagtacaaacagatgctctgattattattgaaatgatccttcattgatctgtccctagttttctgtgcatttgacatgaaacatggtcaaagtatgttcccactgaaattttgcattgtttttcaacaaagcatggtagtaaattaaggaaattattctagaataagtcattaaatgcagagaagagatcaaaagagtagaggcatcttttacagttgcactgcttacagcaatgataggtaacaagtcatactgttcctaagaagtttctaaaggcatccacagagaatggaaaaatgctctgaacgatcgttgaatgatctattggcaaaatttctttgtcatgtgccaccgttaagcattccatattgctagtggtataatggcatacattgtgacagaacaattacttgcatatgtggctgcattagagattgtgctttccatttgatgaaagtacttgtgtacagagtctgaattagctcttggcatatgtgcaatgtaaatataaaaagaagtactagatttttattttttaagtctgtttagagtagaaagcctatatagaaaataattctttgttttttttagtaatcactttcagagcaatgatataatctggaaaaaggcacattgggaacattgttgacagagccccagcaatatctgtgatcaggaagggtgttctttctgaacaaaagaactttatctttgaatgccaattcacatattgcattttcagttggctctatgttcccttatttggcttgagtgttgaaaatgttgttaaaattttgagtgaagtcaaataaggttgtcatgtatatttttagcatcttcaatgaaatacagtggattccctttctatttcaatagtacgacagctatgagagaacaaagtgttcctctaattgaagtatagaaagaggtaacatttctttatgtttttgtaagtgatatatttcagtgttatatttagtatcttgacagctagaaactcctgcttcagaataccaccaaattaaatgtgaatagtgtcaaaatatatcctaagatcaaagagcctcattactgagaaatgaccttatgaatacttgatttttttaaatttaatgaagaattaaattggtgctctcttttaaaactatattcagattctcaaatagaagttgaagaaatactttccctatctcagtggagccagaattaataagaaattcattccctgtgttttcttaagttaaaatagtcaaactttcagcctttcagatttcggatgtgatacatacacataaacgttgtgtctgaaacagtgctgaaactaatccatgataagaaaactttatttttagatcctgtttgacccatttattaattatttgatagacatgagatactttgctgccatatttttaggttagtggctagatttagtagaactagagtaggaaaggaaatcaatctgatgttgaaccttagtgtcagctacagagatggctatattaagattaccacgttgaaagattgccggatagcctctgtgtctaatatgaagccattaattttgttttttataactcattaaaaaaaagaaaaagaaattttgttttgttatttggaacgtatgatgaatcctgtcaagtatttcctttaaaattggtgatcccagctaaacgttaaatggtcaacagatgctaatactttctagatatattatttactttgttatcttaggtaagatacttaaatttttcagtccttggtttcctcattcatagacgtgggatagtgataaataaaggtgatttgggaatattttatctcatttaatcttcacaaactgccttgagaggtaggtgtgttgttcctttttacattcgtgggaaagataaatgagttgcccaaactaacaacagtgttcagtagcaattgttaggatttcagtccaagtcttgtggatatgtccattgttcttggtggcatttcattttaaatacgttacaagcaatttttttattcagtagcacacagtatattagtctataacatttggcatggatttacaatgaaaagcttatgtttttatcttcagaaaatatatggtaaatgagccgtgtgtattacattatcacttattctaaggttttatataaggttcttattggttattgatttttatgggatcatgtaaaaggattaaggtatgtaagctttggcaagattacagcaatatataacagttaactgtgtggactgctaattgtggctctgagatgtcttcctcaaggaaagcacaccgtagcaatagcaagttttctcatccatgtttgattttgtttgtggtttgggctatccatttcagaactagatgaattcacagtaggtcctcttagcattgataatttcaaataattgtacctagtctttccttcatctttttgtgctgccataatcgtgtatatgaatgttctggttgatgctctcaggagcgtcagcaatactgaatagagaggtaaccaccagagtcttactaggtcatgctttcctgtttctaaccatgatgatgaggcatgataaggcaatttacattggcaaatttgaaatcattgatgatcagagagcagggaaaattgttgtgaacctcacaggcaggttaaacaagtgtggagtgatcagcctgagatatgatgtgcaactcaaagatctagaaaaaaaatggcagaataatctgctctcatcctgtcagttttgtttcattgtactgacaaccttagctggcatcatggaccttgaagaggcaaggtgaaacacataggagggaaagttctgggattctttttctagcaacataatacatacttgtaaataaaatgccttaatgcacaaaaaaggaaaaatggttacacctagattttggattgctaatgtccttttatcaggagatttatggtaacttaaaaagtgttgcattagctggtaaagaagctcttgcctgtagtcccagctactcaagaggatgaggcgagaggatctctttgagcccaggagtttgagaccagcttgggcaaatatcaagactctgtctcttaaaaaaaattaaaaagttgttcaggtgctttgggaagccaaggcaggagtattgcttgaggcctggagtttgagcccagcctgggcaacaaagtgagaccctgtctctgaaaaaaaaaaaaaaaaaagaaaaaaattagtccggcacagtgctgcgtgccggtagtcccagctactccagaggctgaggtgggaggatccacttaaaaccatgagtttgaggctgcagtgagccgtgattgtgccactgcactctagcccgggtgacagagcaagaccccagttcattaatttaaaaaaaaaaaaaaagaaagaaaaggaactgtactgattttgagttactggatattgtaataaagttaaatttttaaaaagtagaatataaaccacattaataaccacttctgtaaacttttataaaacatcttgaactagaattgccatgccatattttttcaaaatattatattgttcttgccattttttgacagaccccttatccctctggacagaatgcaggtccaaccacgctggtataccctcaaacccctcagacaatgaattcacaacctcaaacccgttctccggtaagtaagcagaagcttgaaccaaattacattctctacctgtgtttgtgtgtgtagtggcttgggtttctttggcaaatatttttactggattttggaagtttgttccaaagatgatttattattatgactcctactattatttgttagctttgtattttcagaccttacctatagcaataattaaatttattgagaaaaagaagaggtggagcttttaaccctccactcccttttaatacttttctatagcatgatttttaagtctggttgcattcaagtttactttatttcagcttataatttttgttagttgtactgttcaaaattcaggtaagagtaaaatacaatgattttaggagtaaattgaatttcactaattaaattctcaaattccagtggttttgggaagcaggacttttgaatcagtgttattagatctgttctaaccatttaacagtgtgggtatatgcatgacatataccagtgagtgtattcatttattcaaatgagaaataaattgtgatacaaatgtaaatgctatcatcctctttgttcatcctttacatgaattgcaataagtactgccaagactgagaatttacacaaggttcatcctttgtttcacaaaagtatacagtggcttcagctctccattccttagaacatcgtttcctgccctgcatgattagctttggctagaaggtgcttctgtaacatctcacattgtgtatctcacatccctctttgtacctcagctctgtgtattcttcagaattcagggatatctttttgttccctgcccctgcctttttgcctggagtgcaggaatacctcattgcattagctcctattcatttcattttatgcatgaacttacaattgtttaaatataccaaagacttacttaaagaactaggagagcatagactgcaccaaaatgtaatctctttcttatcctttttctattttccttttccctgttgccctgttctccaatacctgttcttagatcctggttctccccagtgggtggaggaaccattctaaagaggtgggactttggtcctagttgcctgtttgcttgtctctttttttgctgaaatggtcaataagatgtctgatacaagttttgttatgagagtggtttggggatgtgtacacttgacttacttgggcctgagatctcaccagatcaatttagataggccctggttctaataattaaacatggaacattatggtaagctcctattgcaaagaattctttggccctctttctgtatacccccaaccctaatttctgattatcaaaaaagaaaatgaattaaatttacatggttagaactggcgcagaacctgactgaagagctgcatctctaaaccagtttttttgacagcccagcagaacagtgccaatacattgcacagacaactggaagaggaggaaggttttggaacagactcccgtttacaggtccttggctggaagaggctggataaaatactgcattgtaagcaatataacaaactgtacttcttgcaggcagtggtgcctctggcacttaatatttttgaccacatccatttattggctgatgaacagaaatgcattgattgcttcctctctgaaagtctaacctagcatggcagtttctgccaggcatagtggggaaaagaataacaaattgggtgggtgttctctattgggaattagtcaggaagaatttgggggtttagatttttctttattttaaacttgaagtgagatatccctttcagataaatttgaatttaaaagataaatttcgaggcttctttttactccctttcaattttataattgaatattaaggaggaaattgtctgtagttgtcagccatttttctgtggtcataaactcttcagatactatcctctatacaatttttgccatctgctctgctagtgaccattacccaccccattactaaaaatcacacacataacattccattacataccctaaaacaagtgcaagactagcagaccccagactactcttgcttcttgttttaggtttgattttctttattttgttatggggtttttttttgtttttgttttttgttttttttttgtgctgggagggtgaagttggggtctgaaatttggcaggattgcattttctgtttacgtcccaagttgtcatagtctagtctcatccatctcacagctgtcccatctggtgaggagaggtaagctgttacattgaggcagggcctcttcctgtggctttgtagagcagctaaagcttactccattctatttctgcattaataggccattggcaattgcgcagttttaggcttttctgttcttccctggacagctgcctttgcaatccaactggcttcaagtggcctctgtccttccttcaggttatctttgtgcctgtctttctacttgatgcttagaatcttagttaaattcatactgtggaaagaaaatcttttttaaaaataataacaacactgataagctatctgttccattttctcgttttactggaacttttaaacagcagtagttgttttttttttttaatagcctgtctaaagtagtgaagctattaaatacttaatttggagagggagacagtttggcttttgtagtaacgtaaccattgattatttttatattttgtggtgttaagtttcaaaattacatcaatgttatgttggccatgctcagttaccaactgtgcccagaaggggtgagtaagtgggtgggtggcattaacactggatccaagttcacagaaggctgctttcctttatatcaacagtcctcaccatcttaaagacccttctttaacaaaaagaaaagaaaaaagaaagaaaaatttctagttttaatatgagccagcagcgactacagtttgttctgttgcttacagctacccataggattaagactattgtcatttcaaatgaaaaactcaatagccaatggtgactagtgcaaaatagactagggtactttcctagggcactttcctactaacttaagttggggttttctttttcgcttttgtttttatatatatgtaattttataagatactcttcttgttcatagaaaattctcttttgactggaacattcaaaatgtacaaagttttagcttttattttagagccttgaaaatgggacattttctgtggaacagtgataagacaggtactgccatactcaggttaattttgtaacatggcccctctcttccattttcttcaaaagtgtcataaagaaacatttcactccactccctactttcataccacatgggtggtattgcctgttcttgtccatagtagaagtatgatgttttcttctcctaattggaaaactgaaaatacaagacctcaatttctttgaagagaaaattttctgcaagaactgtaactgccagttatcatcattctgaaaaactatattatattgattagccaagtatgatggctgacctaacataacccaagcttgtaggtcattaatgcacttttcattacttgaacaaaaggtgacattttagcttctgaggtgaattcttgacagagctgttttcagctgtctcctacattgtggccatgtgttctactgtaatttgttgaaattttaaaatgtgaactaatggtagttggggaagtaattccaaatgttttgcaaatcactattgcacataacttaaatgctgagcatgagagattgtttcttaatcttcaatctaattcatctgtagtgttaagctgacagaaggaagtctctatagaggaaataagagagccaaagacatatatttttgctccttaaatatattagataaaaaccctgtatatggtttacattaaacactgctttctaaatattttcttttactattaaagggagtggttaacattacaatagctaacgtattagtatccacaatatggctctacataccccggttaatattacaatagttaatgtattagtatccagaatatggctctacataccccaatatttttgtctgttcctttcagttaaaatgtattcaaacccaaatttggcctggtgaattgtttgatcctagaggtttagcagttaaaatttgcataggtgaaaaaactttttattttcttctgagttagtagaagagttggaatatatattagccactttcaagtactctatgatttagctgaggaattacatttctttgtgctttattcttaggtaacaataggtacatatacacagtgctttgctgttgtctatagtaattaagagatttgacttatttactcttttttcttatcaagcctataagaataccacttggattaatcatgttagagactgatgttctttactagctgtttgccttgacatgccttgtattaaattatattagttaaccgcatttaaacttaaacttgtgtgtgtgtgtgtgtgtgtgtgtgtgtgtgtaaagtcataaaagatttttctttaactccaagaaattaagatactgaaacttccatttcatggataagatatcccatttaacttaagaaaatttgcagttaattgtgttacgttttttacttcctgctggactttataattatctcctggctaggtcttgtaatgtaaaagctttctcatttcctccagctgtatcagttacatacagcatacttgattttcatgtttgtcttaatataaccacttaatttttcaaacttgcttttgccttattttagggtttttttttttttttaaataatcctatcagagagtaccttacatgcctaacagcatagcctgtttctctcccagttgataaatgacaaactattctgatagtgctgttaacctgttgaatcttagtacctgtctgtcactgtcctgcagcaaagctttgactgttttgtgtgttgttttttatttccccactgtgggttttttttcttttggcatattgtgtgaaattttggtttttgttgtggtgtttctgactctttgtgcctttccttttgtgtttgttttccctccttttctcagtttgcagcggggcctcgacctccccatcatcaggtactgtacccttgccccttcactatcacccttaactaatagatgggggctttagtagctgctgactcttagaatgctgccatcccatagaactactcaaattactcatttcaagagtagcttttatctgatataattcagctttctttgtccttcattaatctcactgcattttgttattaacaaatccatttgcctctgtttatggcacatttaaaaaatgctacagttttttttttcttgccaagcattgtttttaaattttacaattttgaaaaatttagatactaagtgtttatagattttgtggatatttgtagtaagttaaatttaactgaatgaagcaggcagcattctatgggttttctgttaacattccgatataacctgtattgatgtgtataaaatagcattagtatttctaaaaccacttaaactcagttactaacttagatctagtaataaattgattaaaaatcatgtacatccatttgctggatagaattatttttattattagaacacatagaaaatagatatcttaattaatttaaataactttatcctattggttttttaaatgaaataattttaattttttaaatgaaataatattaattctatcctattggtttcatacttctatcctattggaatctatttagaggtggcaagacagaaggacttgcagggttctccctccaaccccccagtagctttttatggggtattctgaaacattttcttctgctgaaagagctttggtttagtctgttcatattacaagctttactatgtaaccagctggttaggcaagtctttttctgcatctttgtttcctcatatgtaaaatggagataaataacctctgccttagaaatagtgtaagcatctgacacaaaacaagcagtcagtaagtggtaactgtctttaatatgattgttatggaacaaagtctggttggataaagtaaatgttaccagtatttgcctgtgttatcatatttacaattcttattactgagtaaatggatattgtttagttgaaggcttccagtgatttaatacctgactctgtttttcaaaatgtattccttccaatctggaggatgtaaaggcaaagcaaatctgagttattaaaggtactttgcaggaggatggctatatggggtggatggctattgtttgggtttcatagtgaaataaaacctcagggtattttttttaattcagagataatattgtaaagtattaatactttaagagcttggacttcgccatcagctagatctaggtttgattcttccatgttaaccaagtgttcttggataaatcatttactgctctccaccttagttttctcacctgtaaaacggagacagtaataccatgttgaaactattatgaaaagtaaattagataatgaaaataaaatgattagcggggtgtttggcacatagtaactaggacatagaattagtattactactactaataataaaaatattagtttcttatgtaaaagagtgtttataattgaaaatttagtccagtgccatagaagcatggcttaaattttaatccagggacaaggcaaatactcctaaaagagagagacgttggggatctttactcaagaagcagagtgaaaagaaactatttatttgagaaataactgcaaaggaattagggcaaaaacgttttctgatctcctttatgtaaggcacctgttaatttctttgttcacatgcttgtgtttttcaaaccttggtttattttcataagtcatttcagataagctagcctaaggtaaactgttagtagaaggaattaacgttaccattgaccacaattattttggtggattttatacactgtagattgatggaatgatgagtgaattttgaaacaaaaacagtattgctgaataggccaggtacggttgctcaaacctgtaatcccaacactttgggaggctgaggtgggtggatcacttgaggtcacgagttcaagaccagcctggccaacatggtgaaattccgtctctactaaaaatgcaaaaagtagccgggcgtggtggtgggcacctgtaatcccagttacttgggaggctgaggcaagcgatcacttgaaccctggaggcagagtttgcagtgagccaagatcacaccactgcactccagcctgggcgacagagcaagactcccatctcaaaacacaaaaacaaacaaaaagaaccatgttactaaatagcctgggcctttcttattaagactagtaactcttttaaagactgttgatcaaaaaatttaagttcttaatgaaaatagaagaaactttaaggttatgtttctgctacttgggttcgataatagtggttctaaaattaggatattgtatttaagcatttgtagtgagctttgggaaattctgttctctaagaaaacttttatgagctttaaagttatgtggtacattttgtctttctttaattccaacaatcggggaaaatgttcagaaatctctgtgagaaaaggttgatttcagcccacattttcatgtgcagtaggactcagtaaagtgttagcagattagtcgtttaactgtatgatactgctcatgaatttatggctagttttgattattttaaaaatagaagtataagctggatgcggtgtttgatgcctgcaatcccagcaatttgggaggctgaggcaggtggatcgcttgagccccagagttagagatcagcctgagcaacatggcgaaacctcatctctgcaaaataaaaataaaaatacaaaaattagttgggtgtggttgtgcatgcctgtagtcccagctactctgggaggctgaggtaggagaatcacctgagcccaggtggtcaaagttgcagtgaggtgtgattgtgccactgtactcagcctgggtgaaagagtgagactttatctcaaaaaaaaaaaaaaaaaagtatatatgtttattatatttattatttatttcttaccaagaaacataattatcatctaacaatagttcttggaggtaagttcctaagatacagtataaattcagagcaatgatttttaattcagaaaattcaggtagctggcacttttttctttgttatcctttttttcctgaacaccagttaaattcttttcatcatatcacagagaattgaataaggatgtctgtacccttgcctcaggcagcaacagtaattaccttgaatagaggagaagaaagacatggggttggagtggcatagctgagcagggctaactgaaccggcattatgtgtggtataggataaattgttagaaagaggttgctattttgcatccacaggagatgtggggtcaatttggtttgtttcactatgggataggtattggcatttgggtgggataaccagttatcaaagctgccgtatataatacaattaatttagcatcgtttgggctttaaatgccagtagaatttccctagtgacaattagaaaacaaagcaaaacaaaagaaaaccaccactgtacatttccaaataccctccatggaaatgacagcatttcccatttgagaatcgcttactgaatctgtatttcacagtatcttctcttcagatctaaagtcaggtagcacctaaaccctgaaagatttacagaggagttgctcataatacagaacaagacatagagacttgcataatgaaatgaaagctgttggaggaaacaaacattgagtggtatacagagaatatacttttaaagggaagacactcatgtcctgggatattttgggttttacatacttaagacttaaagtggaattgaaggcagaaatggttttttcatcggtggtagtttgctttggccagtgaatagatttcttttttgtcctttattgcattattcatcagtggctgcctttctgatcactttacgtcctttcatgctttgatctcaatttattttttgaaggaatttgttgttggatgatgtttttaatgattgttgtttctaaagtccaatagcaaatatagtaactttttgttgatgcttagtaaaaattgcaaagtatgttctatagctgttgcaaagaaaaaatacaattatttaggtaggctttttggaattaattgcttgtgaaaagaaaacatcatccagtttagtaatcttagaacttaaatattttttctgtgtaagatggagttacttgaattcaagtaaacaaaaaataacaagattttaaatggtaaacattttctttgttcttaatggaatcaagaaactgctttgagtgtattccttggaacttcttttatttaaaaggtcttttaactctgtttggagggctagagctctttttgagtccccacaaatcaagtgcgccatgctccagttaggattatttcagccacatcttcttcctgatattactattagtttttgtcttttgtggagattcttcagattaataaggatgtgctattcttttggcattttataacctgaagagcttttagaattacagttttcttcaaagataaaacaagaaatactaagtcattttatatgcaaaacactcttggctttagaaatatgtcaactatttttgcactgatgcttgaaaatcccaaggtaattagaaactgaaagaacagaaagtacactcagaattatagcaagccacttggtataatttggattctggcctgtgttgtttattttgtgtatttggtcattaaaatctgtgtagttctggtttaaagttacttatgttcctgtccttattttactttggggtttcacaatagagatcaagtgttggttatatactatgactaagtagtcttttcattatgagaaagaccagggaaatagtattttaaagtgttcataggacaaaacactgtgcagttttttgatatatgattttggttcacatacttttcacaaatgctgaaaaatatgctgtattcaaagcagtgggatttagtgtaaacaaataatgagcttcataaaaccagcgtacactatcagcaggaggaggaggaggaggagtatgtgccataaagaaatgtcttacttggtggcaagcgttgaaattgtgcatgttttcctcttgtggtttggttctttttgtgaaaaagaaacttttgaaaagaactgctgatttatgtagatttctttttcattatgatccctaaaggtttctttactgaaagtttgtgatgttatattcctagttgagatatatttgtgttactataggcaatttattagatttggaaagtaaaataaatgggccagacctggcacaacagagttaaatggatatgaatagcaagccatctcaagcatctatacgaccttatgacatcttaaattatgatcttatgaactttttgttttttggagcttggtacaagtgagtgatgggtggttttatctggtatctcattcacaaggagttgtatagtagcagcataaataatgaagaaaatatatgttgggagtcagtaaaactgggattcaatttcagcttcactacaaattatctttgggcctcaagtttctgatcttcaaaatgggtaaaatatgctaataaatgatataatactgagatgttttaataactgcatatatttcctatgggtgtggtgaggataaagtacctgcctatcacagtgtctgaaatgaaataagtccttggtaggtgtcagtttcctttagcagtgagactacctgcctttccccttttcccaagctattttttagcatgagtgaagtattttataaggatgctcatttccaagactctcccttatgatctgacagaacacctcctgttcctgacataaacctctagggtagcactgtgtaatagaatttctgtgatgatgaaaatgttctgtacttgtgcttttcactgctgtagctctactagctatatacatggctatagagcactttaaatgtggctaatgcagctaaagaactgaattttttctttttttttttttatgagacagagtctcactctgtcacctaggctggagtgcagtggcacgatctcagctctctgcaacctcctcctcccaggttcaagtgatttttgtgcctccgcctcctgagtagctggaactacaggtgtgagctaccacaccctactaacttttgtattttttgtagagtcaggattttgccatgttggtcaggccagtcttgagctcctgagcttaagcgatccgcccatcttagcctcccaaagtgctgggtttaaaggcgtgagccactgtgcttgacccggaactgaatttttagtacaagtagttaagtatggcttgtggctcctgtattgaacaactcagctctagggcttccatatcccgattcttagtgaaacctaaattatataatattgaccacatgccgggaaatatagaaaaaatttagaatggaataatctccattataaattaccatggattaacagattatcaaattgacacctgagtgatgtcccattatgtggactctttaaagcttgtccctttctaacttgccagcaaatcatagcactgttcttcaagagtacttcagacttttaaaagatattcaccaaggaaatttctaattgcagatgttagtttttcatcttctagtaggctgacctatatactgaagcatattttgtattgctttgcaagttaataaatataggcatgcctcggagatattgcagacttggtttcagaccacgacaatcaagcaaataactgcaataaagcaagtcgtgaattttttggtttcccagtgtatatatgttatgtttccactgtgctgtagtctactaactgaacagtagaattatgtgtaagaaaatgatgtacatatagtaattaaatactttctcttttttttgagatggagtcttgctctgtcgcccaggctggagtacagtggcgcgatctcagctcaccgcagcctctgcctcccgggttcaagcaattctgcctcagcctcccgagtagctgagattacaggcatgtgccactacactggctaatttttgtatttctggtagagacggggtttcaccatgttggccaggctggtcttgaactcctgacctcgtgatccgcccacctcagcctcctaaagtgctgggattacaggtgtgtgccaccgcacccggctggtaattaaatactttctggctaaaaaatgctaatgattttctcagtcttcagtgagttgtaatctttttgctggtgaagtgtcttcaatgtagatgggtgctgactgatcagggtagtggttgctgaggattgagatggctgtggcaatttcttgaaataagacaaagtttgtcacattgatggactcttcttttttttaatttatttgtttgtttttgagatggagtcttgctctgtcacccatgctggagtggagtggcgtaatctctgctcactgcaatctccacctcctgggttcagttctcctgcatcagcctcctgagttgcggggactttaggcacatgccaccacatctggctaattttttgtatttttagtacagctgaggtttcaccatattggccagagtggtcttaaactcctgacctcaggtgatccgcccgtttcggcctcccaaagtgctgggattacaggcgtgagctactgcacccggccagtggactctttatttcatgaaagatttctctgcagcatgtgatgctgtttaacagcattttacgcaaagtagaactttcttttatcattggagtcaatctcaaactctgctgctgctttatcaactaggtttatgtaatattctaaatcttttgttgtcctttcaacaatgttcacagctccttaccgggagtagattccatctcaggaaatcactttttttttgctcctccatatgaagccagtcctcatttgttcaggttttatcatgagattctcatgataaagtcagtcacatcttcaggctctactttttttttttttttttttttttttgagttggagttttgctcttgttatccaggctgcagtgcagtggcatgatctcggctcactgcaacctccacctcccaggttcaagtgattctcctggctcaccctcccgagtagctgggattacaggcatctcccaccatgcgcagctaattttttgtatttttagtagagatagggtttcaccatgttgggcaggctggtctcgaactcgggacctcaggtgatccacccgcctccacttcccgaagtgttgggattacaagcgtgagccactgtgcccggcccaggcactacttctaattctagttcttttgccatttccaccgtatcagcacttactccttccattgaagtcttgaatccctacatagtaatccatgagtattggaatcagcttcttccgaaatgcttgtgaatgttgnnnnnnnnnnnnnnnnnnnnnnnnnnnnnnnnnnnnnnnnnnnnnnnnnnnnnnnnnnnnnnnnnnnnnnnnnnnnnnnnnnnnnnnnnnnnnnnnnnnnnnnnnnnnnnnnnnnnnnnnnnnnnnnnnnnnnnnnnnnnnnnnnnnnnnnnnnnnnnnnnnnnnnnnnnnnnnnnnnnnnnnnnnnnnnnnnnnnnnnnnnnnnnnnnnnnnnnnnnnnnnnnnnnnnnnnnnnnnnnnnnnnnnnnnnnnnnnnnctctcctctctttttgggggaatagggtctcacgatgttacctgggctagcctcaaactcctgggctagaacaattctgcaacctcagcctcctaagtagctgggactccagtcgtacaccactgcacccaggaatattcttaatggcatcagcaatggtgaatcctttccaggaagttttttatgtagtttgcccagaaccatcagagaaatcagtatgtgtggcagctgtagccttacaaaatatacttcttaaataataaggcttgaaaatcaaaactactccttgatccataggctgcagagtggatgttgtgttagcaggcatgaaagcaacattaatctctgtatacatctccctcagagctcttgggtgactaggtgttttcccagtaagcagtaatattttgaaaggaatctaagctctctacaatggccttaaaatagccagcaaaccatgctgcaaacagatgtgctatcattctggctttgttattttatttatagggcatagtctgagtagatttagcataattcttaagggccctaggattttccagatagtaaataagtattggcttcaaattaaagtcaccagctacattagcccctaacagtagagtcagcctgttgaagctttgaagctttgatgccaggcattgacttctcactagctgtgaaagtcctagctaaagagaagtcaatgcatgacatcttgtttcaatagatggctgtttcatctacactgaaaatcatgtgtttagtgtaggcacttttatcagttttcttggctggatcttctggataacttgaagcagtttctccataagtacttgctgcttcaccttgcactttcatgttatggagacagctgctttcactaaacctcatgagctaaactttgctagcttcaacttttcttctgtagctttcttacctctcagccttcacagaattgaaatgagagttaggactttgctttggattacattttggcttaagggaatgttgtggctggtttgatcttctatccaaactgctctttctccatatcagcaataaggctgttttgctttatcatttgtgtgttcactggagtagcactttaaatttcctccaagaacttattctttgcatttacaacttggcttttgaagtagctttcagcctatctcagcttttaacatgccttcctcactaagtttagtcatttatagtttttatttaaagtgagagatgtgacacaagaccatatagaggccactgttcagttattaatttccatataatggcctaacttcaatattattgtgtctgctgaataggaaggtctaaggagaggagaaaaatgggagaggcggggggacaacagacagtaggtggagcagttagaacacacaactttcttaagtttgctgtcttctatgggtgcagttcatggcgctcccagttacaatgataacataaaaggtcagtgatcacacatcaccataacagatataataataatgaaaaaattgaaatattgggagaattaccaaaatgtgacaaacacgaaatgagcacatgctgttggaaaaatggtgctgatagactttctcaacacaaggatttcacaaactttcaatttgtaaagaatgcaatatctataatgcacaataaagcaaagcagaataaaatgagctatgcttgtactcagagcttttccccacatgggaatatctaatgtgattaaataggatttttctagttgctgaaaatgaaaagatgtttttcagagaatttctgttatataatttgttagaggtgtttttgtcttttcatgcttttactgagcaaagtcatgaaaaacgatatttcataattgccagcacgttcaaacaccatttgttagacgtttttgatgaggaagctttgggtaatgatatgaattattgcatctttagaaggatttttcgagaggaaacattttttattctggcttctagagtgtttctgggaaagtaagcaattataagtatgctaagttcagcctctgttttaaaagtatcctatcttgttggatctgcccaaaatactgcctcaaatgagagttttcaccttcctctgccatccttctggtgtattaataataaatccttgaaagatgaaagaagtaaaacagattgaaatgaagtttaggaggtgaattttatgttgtacatggctctcttttctgtgcctagctctttgcagcatttttatcagttacttggataagtgacatttatgtcaagttttcttttttttttttttttttttttttttggagacagagctctgtcgcccaggctggagtgcagtggcatgatcttggctcactgcaagctctgcctcccgggttcacgccattctcctgcttcagcctcccaagtagctgggactacaggcgcatgccaccacgcccagctaattttttttgtatttttttagtggagacggggtttcaccttgttagccaggatgggtcaggttttctaatgatcctgtagtttgacactgtcatgcagtcggtacaatctgaaatgatggcttgtttagccagataaattttcatagttacaaactacaaaatcctctatatgagcttcaaaacacaattgtaagagtacacactgaagtgaagaacacagcttatttagccaggttatgtataaagaggatttaaatgctttaaatgagtgtcagtaccaatcagtagtaaaatatcaaaactgctcctgtgattcttggtttcattaatggaattggagctggcaggaataagagaggtatattgccttttcactcagcaacaaatatttttttagtgagtgccaggtacattctgggcagaccccacctcgatacctttgtgttggaacaagattgaaagaaaagatcaagctcatttgggaattaaaaatcttggttggagggacaggatgctagggagagggttatgattgacttgaaacaaaaaatagtggtgtgaaaattggcagtaatggcagcgttcacataacttagtggtctgttgctgatggagaaggatttgacatctgtgtggttttagggatggacacgagacaagtggataggtgatatagggagaaaaattgggggccagtagaaggaagagttttacagtattagaactccatttaattatgaaaagaatttgtatcttaagttgctgaagtttcttatccctagtggtatattataaaagatattcagactttaggtggatggtgagactaaatggctccttccattcaggagagtttgactcttaatgattgttcatcactcagttgagaagaaaagaaatttgaaggattgcaagcagtttgggaaatcccatttatatattccttttaataacctatggattactgctatgcttgcccaactgagaatctgaatttcttgcattactattaaatctaattatgcatttgtaattgaatggtttggaaggagtacaaaaaggatatatatttttttttttttttgcatttctagtcattacggcttttctagaatctcttctggtgcacgtgtgtgtgtgtaagtgatcctgtacttttaagtggaaaacacaagctccagatagactattgttgtaaaaagtattaatgcagtgaagttgagcaaaagtaagtctgtaaaatggtatgccaaggatacgcttttagcatatgaacaagtttcagtcactttttgggagatagagaattggagttgtgtaggtagaagaaatttgttttcgtgagtaagcatgtgttttgtgaagtaacttgatggaaaatttttcttaccaggaatcagtcatgattgagggacatgccacccgttagtatagttggataaagatcctgctacatcctttcagtgtttgtaaagaaaagatttctgctggtttatgtgaaaatatgggggtattccatttcatgagaggtaatatgtgtaacagttaaaagtacatgcctataatctgactgtgttttagttacagatgggggaggcttccagcaagttatttaatctccctgttcctcagtttttacatatatcttatgacctgttaataatagtacttgccttcaaggtcatttatgagcatgagttaacatatatgttgactgggcacggtggctcacgcctgtaatcccagcactttgggaggccgaggcgggcggatcacgaggtcaggagattgagaccatcttggctaacacggtgaaaccctgtctgtactaaaaatacaaaaattagctgggcgtggtggcatgtggctgtagtcccagctactcaggaggctgaggcaggagaatcacttgaacccgggaggtggaggttgcagggagctgagatcttgccactgcaccccannnnnnnnnnnnnnnnnnnntccagcctgggagacagagcaagactccgtctcaaaaaaaaaaaaaagtgtatatatgtgtgtgtgtgtgtgtgtgtatatatatatatatataatgcttaggttggtgctttacaaatacatttctctttagcttcaaagctgaattcttagtgtataaaaattagtatattggccaagcgcagtggctcatgtttgtaatcccagcactttgggggaggccaaggtgggcggatacccaaggtcaggtattcgagaccagcctggccaatatggtgaaaccccgtctctactaaaaatacaaaaattatccaggtgtggtggtgggcacccatagtcccagctagtcaggaggctgaggcaggagaatcgcttgaacccaggaagtggaggttgcagtgagccaagatcagccactgcactccagcctgggcgacagagcaagactccatctccccccgacaaaagaaaaaaaaattagtatatcaatataactacatatttagtggctttttttggttcagctatatgttaatattaggaatatcattagaaacactgtttttacttcaaagttactgaggaaattagtttcatactgttcagaaacctcattgaataagatgtaacctcagttattctggacaggctggttaaaagttttatcagaacagctggaaaatagtggtaagaaaatatttcacatacagactgttaaaatttttggaaaacattgcccgtatctatttttcttactctgcataagttaatggattcattttctttctcctctccttaccaccccgtaacaccctatttcttcaggcaacataggagtattttgacattatttgatgatagtgttaccataatagatgatcacctgtgttcatttgatacgccctttatcttggctgggctgccctctacagttgatttcaaaggatctttcagtattaagatttttatcctctgcctgtgttatttagcaatgcccagtaagttgaacagataatgactcttctctacttgaggcttgtatcattcttgtggctcctgatattaactacattataaaaatacttaagtttgttcctgaagtgttgtttacagatcacatgcattgatgcatgatagattctgtttgctttgtaattacgagaaatgcagtccagtaatgggaggtttactgctttattgttccttttagcagccaacaaaaaaatgttgtcaccaaaactgtgtcagtggagataactagaagatggttcctgtagttgtattgcatcccaggttcctatgttaccaactttgcctcctgtgctttcttttcatctccatcacctactctctgtggcctgcccctttggtttcccccatttattccgttctcctgctatacctttctggctgttgtttttctgtgacttaatttctttagggctatctttgccatggggtaggaaggctgaatggggatgagccttggacactagatcccagttcttccttttgagcacaagatcaagttacttataccatctgtgggtggtttgatgcctaagagtaggacaaaataagaccagagtgggcccaaaggtcgaagcttggctttatttggactgatagcaacgaatattttgctgctttatttattttggtgcaagaccacattttaagattgttattatagttctccattttagagctataagtgccctcttatatacctgattagttaaaaagagcaagcaagtctctgtcattaagagtctgatatatattgaaaagtttatttcttaggacttttacaaaaataacaaatgacacagatggcaagtagatcacagagatgctagacaatgccagatcatgaaatgggtgatcatgagatccaagagtaagaaccagtagtcacaactgtacttgtgccaccaagcagacatttccttgcacactactataacttgtggctattaataatcatagaggatttttgccactggatttcagttaaatgtaacttgattctttgattctatgtgtggttaaattctcaagtgaagaactgtcattctgattttctagtcttctttcttctcctattattactaaatagaaagatatttttgttgagctgcatgctatttcctgtcccttccaactgatctgtaagcttttccattggctttctttctgtttcctgctgctttcttgcttcatatttgaagggaggattcagacctatccaggtaacaaactactggttctgcatggcctctttataactcagtctgcttattattacattgagattgattgctaatgaatggatacattcacattggaaatttactattggtatattgtttcaaggcttttaatcttgcagtgaaaattataactacaggtactggttgccattttgagaaatttgaactctgctgattccagaccattcttaggcctgtctagattgtccacttttattgcaaactattctagaaggctcagtttagtatgggattgtgccaccttttggagaggaaaaaaactgcttagttcagcatgtgacaaccctacagatggtttaatttagcttgaccctgatggactgggtaaatattttatgatcaaagagattccttgttcttctaagtattttataaattacttgaacagcagtcttttaggaggctacttttaatttttaatgatttgataatgaaccacttactctttatcagagtcagttcttttatataatagagaaatatcaatattagctaccccttttgttatactttattatacatatatgtatgtatatatacagtatgtgtgtatacatatatgtatgtatatatacagtatgtgtgtatacatatatgtatgtgtatatacagtatgtgcgtatacatgtatgtatacatacagtatgtgcgtatacatgtatgtatacatacagtatgtgcgtatacatgtatgtatacatacagtatgtgcgtatacatgtatgtatacatacagtatgtgcgtatacatgtatgtatacatacagtatgtgcgtatacatgtatgtatacatacagtatgtgcgtatacatgtatgtatgtatatatacagtatgtgcatatacatatatgtatgcatatatacatacgtatatatacagtcgggtcgaaaccaccctactgttttcaaatatgtgatgatactgataagagcttgccctagtgtggtatatttttgggaacccagcaataggtaatttattctttttatgcatattgtatttgtaattcaagttgaccagatttttattagtgaagaaaaggagacagtaaaatttatatattcccctgtgttaaaaaaaaaaaaaaattttttttttctccccttcccagtttttccagaggcctcaaatacagcctcctagagctaccatcccgaacagcagtccttccattcgtcctggtgcacagacacccactgcagtgtaccaggctaatcagcacatcatgatggttaaccatctgcccatgccgtacccagtgccccaggggcctcagtactgtataccacaggtaaagtatctttgaggcctaggtggtccagcaatagagtggaaattaacccggattcacatcagagggagctgggtggatgaattgtggtattagttttcggtgacgtgtgaactgttttgttggttacaaatctagcccttttgtgatttttcattatgctgtgtgaagatatttctacatctgtttacttaaaattttttaaaatgataaattgtttttatctacttgctttctcccatccctttgccacaaccaactgctctaaaatggactcagtgattatgctgttcctgaaatcctttaatgtcattgaaaagctactagcctgagattattttacagtgagctgatgtctgcctgtgcactgatatgttgtatggctttactaagctgcacctttctcttcattctcattgtatcttgatggcaagcaagcatttttaatgtgtttgacccaatcgctttacctcatttaaatgattctcttacacagagaactttactttctgtagtaagctactttcttattattttattatgtttttcgcccccagataccatattatttataaatattcatactttctcttttctagtaccgtcatagtggccctccttatgttgggcccccccaacaatatccagttcaaccaccggggccaggtcctttttatcctggaccaggacctggggacttccccaatgcttatggtaagtaggaaaagtcaagacatttctgctagttttttgtgtttatttaattttgttgcttggtgggttggtttatacaatgaggtttagtggtaagaaggatttttaaataacatgctgctaacagttctttcttgaaagctacttttttttttttcttccagaaatgggagtctcattatgttagtcaggctggtcttaaactcctgggctcaagtgatcatcctgccttagcttcccaagtagctggacctactggcacatgccactctgcccagctttaaaagtaattttttggctgggcgcggtggctcacgcctgtaatcccagcactttaggaggccgaggcgggcgaggagattgagaccatccaggctaacatggtgaaaccccgtctctactaaaaatacaaaaaattagccgggcatggtggcgggtgcctgtagtcccagatattcgggaggctgaggcaggagaatggcttgaacccgggaggcagagcttgcagtgagccgagatcacgccactgcactcagcctgggtgacagagcgagactccatctcaaaaaaaaaaaaagacagaaaagttactttttagagagtggcttacaagaggagtattatagaaatatatttagttaatgacatcttctttacaagctgatgattctactggaaagaatcatgtttcagagttctgacatcttccaccagttcactgttacctagatttttactggatttttgccagtggcatgaatataccttatcctcctttcacaatctctttttctccaaacatttcctaccaccttacaccttaaagattttgttaatgtctttcttagtagaatgcaatttccatgaaagtagagatttttgttttgttcactgctatatccccagcccctagaacagtgactggcaggcacttggagaatatacatgccataactaaatataactcagtgaacctgtgattctccgcaaaattgtgataagatctatggcatgggggaggttttgggtattagttccaatgaaaatgccttgaaaaattaaaagtgtttttaatttagagagagctgggttgccaagattattggcatatgcgccaatgctgaactaaaaatgataaaaattacttacttcattcaacaaatttttacttcatattacatttctcttattccatggaaggtgaataataagggataaaattagtagatactagaaaaattaagttttgagattcagtaagcattgatctgttatataaccaacaaagcaaaaacttattaaataatcttaatataacaggataacttatccattaaccagtttcctaaaattgggattgtctcagttaagattacagcagaattgatttgattcaagtagcccaagaaggtttttttttttcagttttgaggtgaagtaggcaaagcaaccaaatgttacgtggctttacttcttttagagaagggaaaagttttctgttaccttggttgatattgtcttgggaaactgctatttcaaagtgatacgcaatacccttcacttatcctcagggaatacattccaagacccccagtgggcatctgaaacctcacatagtaccctatacataccatgggtttttttttttttttttttgatctgataaaagggctactaagtgactaattggcatgtagcgtgtacagcatggatacactggataaagggatgattcacatccctggtgacatgaagcaggacagtgcaagattttatcatgctattcagaatggcttgcaatttaaatcttatgaattgttaatttctggaatcttttgtttagtattttcagactggttgactgcaggtaactgaaattgcagaaaagggattaatactacattttatataacctcactaaatgtctcaaatatgtttatttaactcagctttattaagttgtatcattactatgaaatttgatattttcagaacaataatgtgttacatatatgtgagtttaaaagttacacaatatatatatatatcacccaatttttgacagcatattgcaagtgctgttgaagtattccttgtgtaatccttggacttacctttgtcaccatttttatgtaattctagtgcctttattctaggtccttattctgaaaacttaaatccaagtaattatttttgagagtaacaatggttgttactatctagaattttttaaatagaaaacaatgggattattaatcagcatgaacatgctgaaatagacagtgtctcccgttaatttctgtgttgcaaagggaatacaattagtcttctaatttacaacatcatttttaaagatgtcttactgaattgtaatctgcttttttacttagtgattatgccaatcactttactcagaaaatgtcatcattaaatttcctgctgtaagtctgtgccagccctctttattgcttttaatactattgtacaatatgtatagaaacagtaatgatgaatttactagtagagacataatgtgcagatttgaatgtacaatattataacattttggctttatttctattagatatataccatttttattcatttttatgaaaaagcagtatgttgaggtataattgtatctcagatattattgatgtctgttccctttcatagatatgctttcttccccagtaaattctcatgcagatccagtagacatcaagtgggcagttaatcatctagattaaaatattgtttctctagttttcttaatattagaaaaacaatcttaaaataatttatttcattatgaaagtaactaaattaatgataaaaatttaaaaaggccgggtgtggtggctcatgcctgtaatcccagcactttgggagaccaaggtgggtggatcacccgaggtcaggagttctaaaccagcctggccaacatgatgaaaccccatctctacttaaaatacaaaaattagcagggtgtggtggcgggcgcctgtaatcccagctactcgggaggctgaggcagaagaattgcttgaacccaggaggcggaggttgcagtgggcagagatcatgcccctgcactccaacctgggtgacagagcgagactccatctaaaaaaaaaaaaaatttcaataatatagagtgcataaagttgaaatagccagtttctctcccttcccatcctttaaagcaataacatttaacagtttgatacgtattttttttttcatttatatttaacaagtttttttaacttaaattaacatggaatatttatagtagtgtaaataataaaacttcctggttattgttttcctttcatactatattcatgggcatctttctatttcattatctatagaacttctctcatttcttttaaaatatacataatctatttttggaatgaatcataatttatgatacctaatttttagtactttagtagagatggtgtttcaccgtgtaccaaggctggtcttgaactcctgagctcaggcattctgcctgccttggccttccaaagtgctaggattacaggcatgagccactgcgcctggccatgtttattattgtttctatggaaaattcaaggttttgaattttttttagaagacaggcagtgtgctagttattttgtggaatacaggtgttaagatactcttcctgccattcagtttcttatagtaagtctgttagatattgtgcttaggtttaaacagtgagaagaaatctaaatattgactgcaccattggtttcacattatagacaagtaaaatgaataaaaagtagagtaaaataaagtagaaaacatacatgactattaaatttataatttggccaagaagacctttaaagaaaactgccgtttactgccagtatcatttcatgttttaacaacaaaaatcatcaaataggagcagtcctttatacaaattttaagttgttaaacctctgtgtgacactggggcctgttgtggggtggggggaagggggagggatagcattaggagatatacctaatgttaaatgacgagttgatgggtgcagcacactaacatggcacatgtatacatatgtaactaacctgcacgttgtgcacatgtaccctaaaacttaaagtataataaaaataaataaataaataaaataaaaatacaaaccaaggttcacataaaaaaaaaaacctctgtgtgtgtgtttgtatttcatgattgttattgtattcattttgcaatacatcattgacactttttatatagactgaggtttgggaaccactgatttagaactgggatcagtaaactttttttttcagtaaagggctagatagtaaatatctcaggttttgcaggctgtatggtctctgttgcagctgttcagctgtgccactgtgatgtaaaatcagccatagacagttgataaactactgtacgtgggtgtcttccaataaaactttatttaaaaaaataaatagtggtggactagatttggctcttagactgtagttgacagatctttgatctatacaaatgtacttcattccatgcataagaaatttgaggtccagagacattaattaacttaactaattaataaatggtatgtaaaaattactcatttctagtggaataaaaatgtttttaaatgtttctgactagcttattataaatattatatatttataataatatactattatattagtagtataggcagtagtatattagtagtagtagggcagattttctactctgctagagctcacagttaagaagacttaatgttttgctaattgcatttaatcccactatattgagattatcttgttctgtcacatttattggattaatgtgatataccaggctcttccccaatcatgtaggctcaaaaatgtttcatgagaagaatccaggttttttttttttttgttttttgttttttttaagagatcaccttttggatcttatttcacttacctcaaaaaatatggtgaagtgagcagattgtgttgcttgcctggcagcatttgaaaccaattttggggatttgttttctgagttaatttctgagccagtgacataataaagtagcacataattgctaatttgagttctgctttgagaatagtttactcattgttagaggatgactgagattttttttttggtctttttacattgaacttactgaaatcatagtcatgccctctgcttagatcttttccaaatctgattcagcaaacctgattgatacctacagaattctggtactgcaaatcatggtgcttccaacaactttacacttgaaaagtgttatggtggtagtggggatgttgatggtgataatgaaagtgggccagccttatttgactgtttgcttagtaccaaggattttacctgtgtgaactaccctcgtacatatttttttccttcttgttacggtgaatcaattatccatgttctatggaaagccaatcttttatgtgtgtactggatcccatcctgtacccatttaaggctattactctagcaattctttctttcccacattgacaattttccccccttcctctgctggattagtgtcatctgtatataggaataggcacactgtttcattgacatattaaggaaagtttttctgattccatatttttgtccagctatagctcaatttttctgcttttcttttacggcaaaatttttaaggaaaatatttgtactcatggttttcattttccgtcttctctttcactattgaacccactcaaatcaggcttcacactcttcacctctctgcccaaacaacttttgtcaaggtcactggtgatttgtactttgaaaaatcttatttgacctcttcagcaccatttgatgtggttaagcacagccctcattcttgaataattttcttgatttcaaccactgccttggttttcatctctttggctggagttttcccaatttctgtgacctctaatagacatggaatgccccaagatttaaccactgggcttcttttctatctgtattcatttcctgagttatctagtcttgtttaaatgttgtttatattctgtgaattccagaatggataactgtaactcatacctatcctctgactccagatttgtgtcactttctaactacttgatctgtatttgaagatctggtaagcacccgaaacttgacctgtctaaaactgaactcttgatttttctgccccaaactctattccttcagcattcctcatcttagcaagtagtacctctgttctttcacttgctcaggcataaaactgaaagagttttccttgagtcttctttctctcacaccagtatccaattcatcagcaaatctataggctctaccctcaaaccatccagtatttgaccccttctccacacctctactccaaacaatttggcttgatagtaattataataatagtcttaagttttgaaagttaaaaacagctcattgggagtacaaggagtgggggaagaagataatttcaggcagatgggcagtacagtcaaaagttgaagagattggtgtactcaaaggataggagttaggagtaggttatagctagaacaaagatgtggattcaagaatgatagaaaatgtaatttggaacctggattctaagtatctggactttatcttaaggccatatgttctgagccttttttccaccccagtattcggaaatttgctaatcctttatgtacctccctatggcagtagttccccatgagtaaggagaagaattagatcacccctactttccaagatgatcagatatattcccttctgtccctgacaaaacccataaacaaacatacacatacacccttgtgtgagagtcacagttgcatgtggtaagcctcagaataatattttttaaaagcatcactatagcatgatccatgttttagaaagacaactgtggtgtggatctgtaggaaccgagtatttagtggttttcatattggatgtttgtgaatgtttgaagacattacatattttgggaataatttcttgaccacttcagtaactggaggagagctagtggaaaaagatgatgaagaatgcttagtgtttttgtttttacccttttaaggggattgtgcagagacacagtgtcattgctagttctgtagtgtttgacaaaataactgaatgcctatttaattttttccaactttttaggaacgcctttttacccaagtcagccggtgtatcagtcagcacctatcatagtgcctacgcagcaacagccgcctccagccaagagagagaaaaaaactgtaagagatttttattactttttcttattttaaatctaaaatctattcacttatcagataagtttacgtagtcattattcatctcaattcacaaattactgtgccttttttttttttattcttcccttatagtcacaccacttcacctggaggatttgtatgggcatgtaattagaagttgttcataccatttgcataatatcatctttaattattcactgagctaggtttgctacatgacaacatgtactccacctttagaactgggagggtttagtgggctaaggttttactcagtgtgaggaatttaagctcagttctcacatctagactctcctttaacaccagtctttttctttttttttttgagatggagtctcactctgtagcccaagctggagtgcagtggcgcgatctcagctgaactgcaccctctgcttctggggctcaagcgattctcatgcctcagcctcccaagtagttgggactacaggcacaagccaccaggcccggctaattttttgtattttagtagaggtgggatttcgccatgttgcccagggtgatctcgaactcctgagctcaagcaatctgcctaccttggcctcccaaagtgctgggattataggtgtgagccaccgtgcctggccaacaccagttttaatcagctctccattcaagtatgaattgacagaagaaaaaaatagcacaaggaaaaagaactgagatattaaggatagcaagaaaaatccttcctgtgaaatagatatcttttaagaaacaaaaaacagagtttagaaaatgtattctaattgttttttataatttataggggttttgtctttgtctaatgaggcaggcccaagagaattggagtgtagtaatataaaagtcaaatggcagaaaaattgtagaagagtggcttgcaattccttacgcaacagaacagacaaaatgggtgatctttttattcaagagagactcccacattcacacgagtaagataggtggggtgatttatagcaatactcttgaattactctaacttaataaaaattaatgaggttcaggccgggtacagtggctcacacctgtaaccccagcactttggaggccgagatgggtagatcacttgaggtaaggagctcgagaccaacctggccaacatggcgaaaacccatctctactgaaaatacaaaaattagctgggtgtggaggctcgtgcctataattccagctactcgggaggctgaggcacgagaatcacttgaaactgggagggggaggttgcagtgagatcgtgccactgcactccagcctgggcaacagtgtgaactgtatctcaagtaaacaaacaagaaaataatagtgaggttcaagactttggtttaaaacttgtttttatcattagaaacaaattacttgtgcatatatcataatgaacaggacatgacaatgtatcatgacactacagtcaagaaactatatgctttggtaatgttgaatcagcatgatagaagttggacttgaagaacactctcagaatgcagaaaaatgaatagaagaaatgaaaccggaagacagtagttacagatgtttctaaagaagaaagtagaataaatgaattaaagctatacttaaaactttattagaaataattttccatacctaaacaatagctggcattagaagtcttaattgaaggactcccctaaaagcgtccagatccaggtagtttcattagtgaattccttgaaattctcaagaagtgtggactgccttgattaaggtatggtggtaataaacaacagtgggtcctttatatcttagcactctcccagaatagaatgcctagtcgcagacacttacctcctttacagcaccaactccactgacatctttaagcatagggtagcctttaaaaaaattaaaataagaccatacacactttgtgcttattgcattttttcacctaccagcacatcttaatgattattctgtgtcagttcatgtagatctgcctcattctgtttttttgagacaaagtctcgctcttttcccccaggctggagtgcagtggcgtgatctcagctcactgcaacctccgcctcctgggttcaagcgattctcctgcctcaatctcccaagtagctgggattacaggcgcctgccaccgcacccagctaatttttgtatttttagtagagacagggtttcaccatgttggccaggctggtctcaaactcctgacctcaggtcatccgcccacctcagcctcccaaagtggtgggattacaggcatgagccactgcgcccggccagatctgcctcactctttttactggctgttaagtatttaattgtaaggacgtaagataatttttttttttaaatggagtcttgccctgtcgcccaggctggagtgcagtggcgcgatcttggctcactgcaagctccgcctctcaggttcaagtgattctcctgcctcagcctcctgagtagctgagactacaggcatgtgctaccacgcccagctaattttttgtattgttagtagagatggagtttcatcgtgttagccaggctggtcttgatctcctgaccttatgatccgcccgcctcagcctcccaaagtgctgggattacaggcgtgagccaccgcgcctggccgacgtatgataatttttgagctattctgttctcgatcaacctttttccagtctttgctggaaaaggcatgattgcagtcagcattattacatttgtatataaggttgttgtcagaataaattattcctaactcgtagggtatttatattttttattttggtaaagaacttcagagaattatttacagcgtttaaaactttattctacgccaggtaccgtggttcacacctgtaatcctggcacgggaggctgaggcacgagaatcgcttgaacctgggtggcggagattgcagtgagccgagattgcgccactgcactccagcctgggtgatagagcgagactgtctccaaaaaagaaaaaaaaaggaacttttatctatgcagtaactttcatatattaaaagtattttatgaaacttgtatgttaaatatggtaaataaaatcagtcttacaggttcttacaaaacaagtataaatattaatagtttgcctttttgacctagaaatccagccaactaggtttcattttagcttgttattctaattagttcatgtcagagctaatggcctacatttatctgatggatctgtgattgaaataaagtcaaatgtggtgattatcacctttgatatttgacaggtttcccagtttgcacctttaactcacttatatgcctataaatttgctacacagacactcatctgtacatatgtcattttatttaaccttatagataagaattcgggatccaaaccagggaggtaaagacataacagaggagattatgtctggaggtggcagcagaaatcctactccacccataggaagacccacgtccacacctactcctcctcaggtaagacagagtgagctgtaatggatggcactatttgttcactaacctctactgaactcttctttcttctatagccactttctgtacttttcatttccatcagttgtctcgcagcctcgaatatctaaatggtatttaaacagacatgttttttctctttgcaaattataatatttttaaatttttattggtaatatatttatgtattgttttcacaatcagagcacaggtgaggtgctgccactcttcttaatgaactatcgcatgatgccaaaaggagctgcattcttgtagaaacctcatcattaaatgagtatttcacatttcacatggaaccttaggatttaagtgctgcaccttttgttaacgcaaacattaaggttgagaatttaacatttttaccaaacagtgttgcttgagatgatttcctgtgttattgagagcatattaggatgtataacaggtatacttcttaccttttagaactacataaatgagcttcttgagtgcagagtgtcttctttaattacagtcatcccttggtatctacaggggatttgttcaaagatgccccctccacagtaccaaaattcgtggttgttcaagttcattatgtaaaatggcgtagtatttgcatataaacagtgcacatcctcccatatactttaaataatctctaaattacttataatatctaatacagtgtaagtagttgtcatactgtagtattttaaaatttctattgtgtttttatttaaaaatgtttttttctaaatattttttatccaccgttggttgaatctctgaatgtggaacttattaataaattgtcagttaggcacctttttcttcctggtgaagaatgtggttatcataatctcctaagatgttactttcttgtttttagaaatcaagatattgtagaggaaactggagtttagtaaactataatagagattagattccgcaaatctgacaagatttgtatttcaaggccgggcgcgttggctcatgcctgtaatcccaccactttgggaggctgaggtgggccaaatcacccgaggtctggagttcgagaccaatctagccaacatggtgaaaccccatctgtactaaaaatacaaaaattagctgggcgtggtcgcacatgcctgtaatcccaggtactcaggaagctgaggcaggagaatcgtttgaacccaggagacggaggctgtggtgagccgagattgtgctgctgtactcaccagcctgggcaatagagagagagagactctgtcttaaaaaaaaaaaaaaaagatttgtatttcattcctcctatgtcactttgcattttgataaatgatatagagacacgtggttttcagatcttaaaaattatctaaagtgaagccaattgcaggtgcagtggcacatgccgatagtcccagctatttgggaggctaaacaggaggatcccttgattccagcttgggcaacatagcaagatcctgtcccttaaaaaaaattgtctaaagtgaaagcctaatgtctagaaacagataaaaagaaagctattaaggagtagggggctgctctctttgctcttttatgcctggatggtaaaggggttccttggagcccagtttacaaacaagtgatatggatgatcacatagaaagcatttcagaatgatagactattgacttcattttagtagtacagacaaaaataaaaagttcataaaaatattcttaaatatcaaaatcacaaacagctggctgagtttagagccccttggaaatctgtggatttgagaaagacttaattttggtcctttgttgtaatgatatgttttctcttggaaatgatggtatctggctgacatttatctcagtctttcattatccagatgagtatatatgtccatctggacatgtgtgttgtaaggtcatgttaataattcttcatcactcctcattattcccctagggacattccaattttggaatgattaagcaggtcttatatttagtctcttccctggaagtgagcatgggataagcaaaattttcaaattgaagtaatctatatatgtgctctgttaggtgggggcacactatagcaaaactttgcaattagttgatcagtgcagtcaaattttagtctgtattttcaaacatattaaaatgttactactgtcaagccagataaaggatagacaatcctttgttgatttctgtttaaattctcaatttggacatgtatgtgtctttttgcacttaaatgccctgtggggtgtgattggttttctgtaactttccaagcttggttcccaccctcttctggtatccctctgtgtttagctacagacatctttttgttctgtgtctttccccagagactgtggttctgaatatgagtgtatatttctctataatcataaagcacatcgaatctacactttcaacagatgaaggccatcagtcaatagtagtaatttggtagttctttttgggaagtgtaacatcagttataaagcataagtttattaggtgaatttcatgcttttaaatccaaatgcatgaaattcatggaatgaacgaatagctttttaacagagacgtgtactagagatatttcattttcctcttaagaaaaacagtagcacaagcataatgatgacaactgacatttgacctcattttctggagcatcatagaaaggatgcagtggctcacacctgtaatcctagcactttgggaggctgaggcgggcagatcacttgaggtcagaagttcgaaaccaccctagccaacatggtgaaaccttgtctctgctaaaagtacaaaaaaactagccaggggtggtggcaggcacctgtaatcccagctactcgggaggctgagacaggagaatcgcttgaacccgggaggcagaggttgcagtgagctgagagcaccactgcattccagcctgggcaacagagagagactgtgtctcaaaaaaaaaaaaaaaatgttgacccattgtttcagaagaagctagaaatgtttagttatgtgtaaaaaagctgcaagttataaatattggcaactaatttccttaacaaaatagcaatctgccagccaaagaagactcattagatttaacttcagttttactagttttcaattttgacatcaatccagataaatacagaatcatatctggttagaagactacagatgagacagccctctgcatcagaatttaggattcaacagtaaatactgtagtattggccttaaagtacctgctttgagttagacataattgcttatgctgtggataaccaagcctttccctatcaccgagggaagtcccagtctctgtaaagggaaacagaagacctgttactaagatctgactggtgcagaggtgaccaagtggggcagaattgtagcacagataccagagacccattaatggtggtggtacatgtgaaatagaacagggaagaggtttaaaactttgacttggaatcagacataactgggtttcatgtgtgggttccactgcttagctttgtaactttagcccaattactttatcccagagcattgctttctacatttaaaaagtaaaacctatcacacagagaggattaaatgagacaaaatacttaaaaattgtttaagttcagtgcctggtgcgcaatgaatattcagcaaatatctattactaatattacaattattattatttcaggaggcacagagaatgactggaagaacgtgggaaggctttaccacagagacaccatttgatctaattttcatgggtattcacaaaatgaaagggaaaggggtattgaggcagaggaacagcatgtgcaaaaatgggaaattagatgaagggaggctattattatcatatttcaggtgagaaattcattgaaggagaggaagccagttggagagatgtttagcaattagttactaactagataaggactctaaaaaggatgaccatataatttaccatctaaattggggtgattgtggaaatgaatggcaatgctattgttaatgccagcacagcaggcgtaatcagtactgcacatgtaaatggggatgcaagttttctccagatgtaagggagagagagagtcagggatgcctcttcatgtttaaaaatacgtcttttgtagtgaaacataatattgagtatacatggggaagtttaaagagcgggatataatgagtttgcttttggcaggtggtcaagccattgtgatttttatctaatttggtcttgaggtttctctgtcaagagtggccataaaccaggatagccactctctaagagagccctgaccagggaaaagttatgtttgggtgtgtttgtcaggtgagacataatgaggaagtgaaaccaaaatgcatgaaacagaaaaaaatttactacttcctaatcccagagaggttagcagtgctgatgggaggctgataggggagctctgaagacagcagggaactcacccagcaggtggagagagagagaaagacgactcgtgggactgtccctttattaaggtccatgtcctcccttaggcttccccactggagttatggatttgctagtttgaagaaaacactttcaaagggtgaacttacttacaggactctggtgttaaccattaggttttatcatggtcagcagctatgggatatgttgtgttttgggtcagtgagatgaggaacaaacggcctctttcacaagcaactacacaggaaggaaatatttgaactaggccaaatgtgaaagggtttcaaaaacatatgctagccctaaaagtggatgccgagggagcaattatattaaatttgtgacacaagctatgagttaattgagggaaactgcattgggtttctgtgaggagaatggagaggagaaacaaatttttgctgctgctgtttttaccctaatgagaagtagacagaatttgaaactgttcttcaaagtcttaaaattttctgtgggttagctagtagagattttgtatctcacatatttaggaaatatgcatatgtgtatatacatgttccctgtatatacacattggatccctgtatatgcacagaggatcacagtgcgtagatggaggtgcatggctggatatcatggctcacgagaacacttgctgctggttttcactgtgttacttagatttatgaccttgggtcagaacattaagttcttaaaacccctattttttcatctgtaaaatgaggaattgtacgaaataatctgagagttcccttttagttcttacctattaaagtgggaaagaaggaagaattttgttactcgctcagtatcaaatctctcaactcctgatgatgacagtaaggcataaggaatatccctgtatttagaaatatgctagctattatgcctaatagtcttcattgaaacccggtagtgtaaaaataaatacatgatgccatgtcaagattgtctacttccaaataggatgaatggtggatcaaaaatcacttaattttttttttttttttttgagatggagtctcactcactctgtcacccaggctagagtgcaagtgcggtggcacaatctcggctcactgcagcctttgcctcctgagtagctggaattacaggcatgtgccaccacgccagctaatttttgtatttttagtagagacagggtttcatcgtgttgacccaggctggtctcgaacacctgacctcaagtgatctgctcgcctcagcctcccaaagctctaggattacaggcatgagccaccatgcccggccaaagatcacttaatttttaaaaatgaattatgtacctttcttccttgatatactctttttcccccctgcttctagaattattattgtaatgaaacacagttatgacatgggagagagtcctatgctatggggctttggggtaggaaattatggattgatagcgtatcttaggaaagatacaatctctcctaccatttgggaaaattactaaagtcagcaggttattcagtcttttgttgagctgcttatgaagttgatacctgcaaaccttaaattccatgaccatttattaattacagttgacccttgaacaaaatgggttcgtttatatgataatttttttcagtaaatacattgggaaattttttggacattgtgataatttgaaaacttccagatgacatattgcctaaaattatcaaaaaaagaaaaatttaggtatgtcatgaatacacaaaatatatgtagatactggtctgtgttttcatttagtgccataaaatatatacaaatctattataaaagttaaaatttatcaaaacttaggtacacaaatacagaccatacagagagaccatacagaccatacagagagaagtgtcaacagacacaaatatgcaatctggacatggtggtgcacgcctgtaatcccagcactttggaaaactgaggtggaagggttgcttcagcccaggagtatgagaccagcctgggcagcatagcaagaccttgtctctcaaaaaaaaaaaaaacaaaaaaaaaacaaaactacaagaggcaatattacatcctaacttcataaaattaactgtagtacatactgtactaatgtaattttatagccacctcctgttgctattttagtaagctcaagggttgagagtatccgcttaaaataccctgtgacactaatcatctccagatgagcagttcatctctcctgtaaattgtgcctcatagtaaaaagtaatttctctttgttgttacatattttttcattgtgcttagtgcattgccataaaccttgaataacaccatgggacccatacagagtgccaccagtgatgctggcagtacttccaagaggcagagaaaagtgctaacattacaagaaaaagttgagttgcttgatatcaactttttgatatcaagatatgcttgatatctaccatagattgagatctgcagctgtggttgaccaccattttagacagatgatttattttataaacagatgatgtaaacttatgatactgataaatacagcatagtattggaaatgtattttctcttcctgatggttttcttaaacacattttcttctagcttacattattgtaagaatatagtatataatatataaaacatacatactgagaaaaaaatatgttttatcggtaaggctttcagtcagcagtaggctgttaccagttaagtttttggggagtcaaaagttatacacagattttcaactgtgtggggtcagttcctctagctcctgaattgttcaagggtcaactgtagttcatttcatggtttagcagtaatagtttcctagaattgggtctatagcttcggttatgatattcatgttatatgttaatatgtgcagtaaatagttacattcctgcatgaagaatttgaaggtgatacctagtataatgtaaacaaatccaatcttttaaaatttcattttgtcatctcagtcataggcactgataaattaatagcattctgtaccttaaagcatacaggtatggtttttgttttagtggtgactacgataaaaatagtggttactaaattaaattatatttttctttatctttaatgaaataacttatcattagtaacctcccttgacttaaatggttcttttcaataatatgtaaagccttgtagactttaaataggtatctaaactggggtggattctctcaaaagtttttaaatgggacatttgaaaagtgtcctattctctgttcgtcatgatgagcagagatccttgctttgttatgctgtttcatagattaaaatgaatttgtatacactatatggtttgatagaggaaataagatctagtgtttggtagatcagtaaggtgactatagtttacgataatccattgtacattttgaaatagctagcagagaagaattcaaatgctcctagcataaagaaaagacaaatatttatctttgaattatgtgaatgtgttaaatttttgtgggtacactgaaactgtgtacatctgttacgcagtaataaaaattattattattatttttttgagacggagtcttgctctgtcaccaggctggagtgcagttgtgcaatcttggctctctgcaacctctgcctccctggttcaagcgattctcctgcctcagcctcccgagtagctgggattacaggcatgcaccaccatgcccagctaatttttgtgtttttagtagagacggggtttcaccacattggccaggatggtcttgatctcctgacctcatgatccgcccacctcggcctcccaaagtgctgggattacaggcgtgagccaccacacctggccaataaaaattatttttaaggaatttgcacacagaccatcaaagacctactcattgcttatctgacagaataaaaaacagtatcttgtttaatttttgtgtattctgtgaagttaagaagttttcgatgttcaccagttatttgtgggtgtatgaattatctgttgtacacgtttcttttgggtgatgatttttgtctgacagatttataagagggctttacatgttaaataaatactttgacatatgttaacatttttttcttgtttgatgattgtgttttagctttgttaatcgtgccttctgtcatacggaattgttaaattttctgtttcatttatttttttgagacagggtcttgtctgttgccctggctggagtgctgtgacacagtcacagctcactgcagccttgacatcctgggctcaagcaatcctcccacctccacctcagccttctgagtagctgggactacatgcacatgccaccatgcctggctaatgttttttattttcagtaaagatgaggtctcgttatgttgcccagactggtctcaaactcctgaattcaagcgataatcctgcctcagcctcccagatttctgctatgagccactgcaccagctgaattttttttttattttgaaacagagtctctgttgcccaggctagagttcagtggcatgatcttggctcactgcaacctccgcctcctgggttcaagtgattcttctgtctcagcctcctgagtagctgggattacaggtgcctgccaccatgcccggctaatttttgtatttttagtagagacagggtttcgcctgttggccaggctggttttgaactcctgacctcagttgatctgcccacctcagcctcccaaagtgctgggattacaggcatgagccaccgtgcccaggcagaatttatttttgatatatacacttatatatcaaaatgcacttagattagttccacatctttgcaattgtgaattgtactgctataaacatacgttttcaaatctctttttcatatgatgacttcgtttcctttgtgtagatacccagtagtggggttgctggatcaaatggtagatctacttttagctctttaaggaatctttgtactgttttccatagaggttatacattcccaccagttttacattcccaccagcagcatataagcattcccttttccccatatccatgccagcatctattgttttttgactttttaataatggtcattcttgcagcagtaagatggtatcgctttgtggtttcaatttgcatttccttgatcattagtgatgttaagcatgctttcatgttgtttgtaggccaatttatgtatctttttttgagaaatgtctattcatgtcctttgcccactttttgatgggattattattattattattattattattattattattattattgctgatttgtttgagttccttgtagatttccttcatcagatgtgtagtttgcatctctatgggttgtctttttactctattgtttcttttgctgtgcaaaaggtttttagtttaattaggttctatttatttgcgtttttgttgcatttgctttggggtcttactcatgaattatttgcctgggctgatgtctagaagagttttttccaatgttatcttctagaatttttacagtttcaggtcttatatttaagtctttgatctatcttgagttgacttttgtacaaggtgagaaatagggatcgtttcattcttttacatgaggtttgccagttttgccagcaccatttgttaaatagggtgtctattcctcaatttatgtttttatatgctttgttgaagatcagttggctgtactttcttggctttacttctgggttctgtattctgttccattagttatttgcctacttttataccagtactacgctgttttgttaactataaccttgtatgatttgaagtaattgtgatgcccccagatttctcctttttgcctaggattgctttggctacttgggcccttttttggttccatatgaattttaggatttttttttctgattctgtgaaacgttggtattttgatgagaattacattgaatctgtagattgcttttagtagtatggccattttcacaacattgattcttccagtctatgattatgggatgcatttccatttgtttgtgtcatctgtgatttctttcagcagcgttttgtatttctccttgtagagattttcacctccttagttaagtatattcctaggtatttcattttatttttgcagctgtggtaaaaggtattgaattcttgatttaattctcagcttggtcgttgttggtgtatagcagtgctactgatttgtgtacatttattttgtaacctgaggctttactgaactcatttatcaaatctaggagtcttttggaggagtctctagggttttctaggtatacagttatatcatctgcaaacagtgatagtttgacttcctcttttccaatttggatgccctttatttctttctcttacctaattgctctagctaggacttccaaaactatgttgaatagaggtggtgaaatgtaggcatccttgtcttgttcctgttgtcagggagaatgctttcaactttttcccattcagtatgatattggctgtggttttgtcatatatggattttactattttgaggtaagtcccttttttgcctacttggttgaggattttatcataaagggatgctggattttgttgaatgctttttcagcgtctattgagatggtcatatggtttttgtttataattctttttatgtgatgtatcacatttattgacttacatatgttaaaccatctctgcatccttgaaataaaacccacttgatcatgataaattatctttttgatgtgctgttgcatttggttagctagtattttgttgacagtttttatatctgtgttcatcatggaaattggtctgtagttttctttttttgtgtgttctttcctggtttaggtatcagggtgatactggcttcatagaatgatttagggaggattctctctttcccagtcacttggaatagtttcagtaggattggtaccagttcttctttgaatgtctggtagaatttagccatgaatccatctggtccaggctttttttgtgtgttggaaattttaaaattactgattcaatcttgctgcttgtcattggtctgttcagggtttgtctttcctctgatttaatgtaggagggtggtatgttccaggaatttatccatttcctttaggttttatagtttgtatgcataaagttgttcatagtagtctcgagtgatgttttttatttctctggtgtttgttgtaatgtctccagtttcatttctaattgagcttatttggatcttctctcttttcttggttattctagtgaatagtctatctattttttcaaagaaccaatgttttgtttcattgatcttttgtaatgctttttttgtttgtttgtttgaatttcatttagttttgctgcaatttctgttatttctttttttttttttttgagacagagtcttgtttagtttgtgcttgtgcttgtttttctaattccttgaggtatgacattaggttgtcagtttgcactctttcagactttttgatgtagacatttagtgctgtaaactttgctcttggcacttcttttgctgtactccagaggttttgataacttgtatcattattatcatttgattcagataatttttccatcttgatttcattattaacccagataccatgtagaaacagattatttaatttccatgtatctgtgtagttttgagggttccttttgcccccaagaactttaaaaatcattttcttaagccctcttaagtctgccttcaagcttttattttgagtgtccgggtttcctctcatcatttctgaccttggcaacctttcattgctttcaaggatgttctctattgcagatgtgtattgtcttgtcaggtcagtgtttaaagaaaaaacaatatttcatcaatctgaatgctgttagcccaagcatacaccctctagtttgttaagttgttctgttattatttactcccttttgcatcacatattaaggtttctgaagggatttgagtttgtgaccccttcgttataaactatttcagggctaggcgcggtggctcatgcctgtaatcccagtactttgggaggccaagctggggggattgcttgagcccaggagttcaccagccctggcaacatatcgataccctgtctctgaggcaggaggattgcttgagcctgggagtttgaggctacagtgagctgtggtcatgctactgcacttcagcctgagtggcagagcgagaccctgtctcaaaaaattgaataaaataaaatatttcaacaggtgtttgatgtgctctccttgttttttttttttttttttttgtaaattatactgtagtctacctaagttgctgaggttctaagcctaggactcacctttaaatcctcttaatttcactctccacagtcattacatcagcaagtcccatttgactcattcccaccaccttcactgctgttattgtagcctaagccactttgctctccttagacaacaggaactttctcactcatctctctgcttctgtcttgcctctcctctgttgattctgtacacaacagcccaagtgagtgatctttttaaaacataaatcatatcacaccgtttccccacaaaatactatccagtgtctcttcactattgactaactgtccatacaaaaacatacaaaagtccatattcatagaatttttgaggtgtgtaatggggattatgggaactacaagatgagatttgggtggggacagtcaaaccatattagtatagaaagaattagtatagaaagaactgatctatgtggttgatgcctattgtagtccttacatcctgtaattcctgcattagaattcagtggaattattgttaccattatattattgctatggtcattatttattgttttttattgcctttgtattaaaggaggtgcttgttatggcatgtcatatattattatattatgagaacacttcagagcttcaggttagatacccaatttttgacttgatctctgtactcagttatttcacaagccctacaacctcaaaactggagttcatggttttcctctaaccaaacccatgacttccaaaccttatgtctcctccagtgttccctttctcagactggcccctatctcagaaaccagaaacctaatgtttttctttttacccctctctcctcatagataccctctctaccatgtgtcatcagttacctaatcaagcccagtcagtttacccccaacctttaagtaaaattaagtaactgccccccattattaccaccaaaattatttcccttggactactgaagtaaccttgaaaattgcattcttgtaactgctgtttccttgctctagttcattctccatgcagtggtcagaattatctttataaaatatcagccaggtgtgatggctcatgcctgtaatctccgcattttaggaggctgaggcgggaggattacttgagcccaggagttcaagactagcccaggcaaaatactgggaccccatctctacaaaagatagaagaaaaaatagctgggcatgttggtacacacctgtggtcctagctgcttaggaggctgaggtggaaggaacacttgaactcaagaggtcgaggctgcagtgagctgtgattgcaccactgcactccagccaaggtgacagagtgagatcctgtctcaaaaaaaaaaaactaaaaaataaaacacaaatctgattatatcatattgctgcttaaaacctggccctggcttgccattgctatggggataaagaccaaaaacccttggtctggcctgtaaggcctgtctgcctgactcctgcctgcctcatttcacaccagattcccctgttctttctgcatccctcttaccttttacataagggagttgatcatggaatactcttccttttagaatcttcgtacatgtgttctctctgcatgagatgcatctaactgcccttcctcctacatgccaacattcacattgattttttgaaagtcaacctgaatgttgcttactcagaatatcttcctcacatacgtcacaaagtcagaaccccagattatgggtcatctttgtactcttaactttcccagtaaagcatttatacctatagtgattaaatgattaattttgtggtctataccatatgtttcctttgatagaatataagctctgtgaacccaggaatgttgtcttagccatgagtagattcatagtgttttgtacaagttaaacatcaggaggaaatacacacatattgacacacaccgttctaatgagagaatgggagaaattcctacgtaagaaagaagcatgttttggtagtttttcctggcatcgttaagtatattattgttttgcttctttttttttttttttttttttttttgagacggggtctgactctctcgccaggctggaatgcagtggcgcgatctcggctcactgcaacctccaccccccgagttcaagcaattctcctgcctcagcctcccgagtagctgagattataggtgcctgccactgtgtccagcttatttttgtatttttagtggagatggggtttcaccatcttggccaggctggtcttgaactcttaacgtcgtgatccacccgccttggcctcccaaagtgctgggattagaggcgtgagccaccttgcctggcctttgttttgcttcttagccttcatagtgtttctcagtggaggctatacttgtttatccacagattttatatatgttaaatacatgaggtatttatacaggattattttaaagtcattgaatgggattcttatgatgacagtaaatcaactctttgcttatatttatgtaactatttgaagtctctggctttctctaaatgaattacaatacaggtcagcaaatattttctctagtgggccagatagtaaatattttagactttgcagccatattgtctcttttagcactcttcgattctgccattgtggcacaaaagcagttatagaaaatatgtagatagatgggtgtgtctcttccaataacatgttatttatgggcaccaaaatttgaattttatataattttcatgtgtcaagaaatactgtttgtctcttgttttccccaccaccccgccaacatttgaaattgtagaaacttaccttgtgggcagtacaaaatcaggtatatggccccaggattgtagttgttgacccttgtctataaccacctctgtacttaagtattctgtcatttatgtgattaaaatagaagacaaaagaaggtgaccccttttttgtgcaaaacaatgtgcctatgtaaagaaaaatgaattttgaattgtgcaaagaagtattaaagaacaaatttagattctgttgcctgtttacttaataggtaaacattatgtttttaaaaaatgaattcctccagtatgtgggcctaagcttaccatgatctcttgaggtcaatactttaaatttagtatataaatctttgagtaggttctaaaggagaatttataaagaatttttctcaaacactatcaggaatctaatatcttgccctcccttaaactcttttcactctagtttataagtgagaaacactttattttttttccttgtaccaatcagaaccttgattttgaaaaatttgacaggggagtttaccatttacataattgatgagctgttgcaacagtgtgcgaagacttgctaaatgaccctgaccttttaactctgacttccttagcatctttattgagttattttatattttggtagtgattgcctttccagaatgattttataagttttcattcccaccaatagtgaaagtgactaaaatgcagtggctttgaaattccttaaatatattcttaactgtctagcttaatttcttcatatgtatcaaaatgcatacagcattggatgtgatgttttgtgtcacagtacttggtatgtttcctgatttttctgacttattgattagtaaaatagttcatcattattttttctttgggaagataaggaactcctttgttatagactgtttgtttgtttgtttgtttgtttgtttgcttgttttcgagacggagccttgctcttgttgcctaggctggagtgcagtggcgcgacctcggctcactgcaacctccacctcctgggttcaagcaattctcctgcctcagcctcccgaatagctggaattaacaggcacctgccaccactcctggctaatttttgtatttttggtagagacggggtttcatcatgttggccaggctgatctcgaactcttgacctctggtgatctgtctgccttggcctcccagagtgctgggattacaggcatgagccacaacacctggcctggttgagttacttctttaggagagaagagatgaaattggaggttaaactacaatttgacaagattatcctaaattaaaactaattctgaacaagactaaagtattgaattctggcggggcgcagtggcttacgtctgtaatcccagcactttgggatgtcaaggtaggcggatcacaaggtcaggagatcaagaccaccctggctaacatggtgaaaccctgtctctactaaaatacaaaaaattagtttgggtgtggtggcgcacacctgtagccccagctactcaggaggctgaggcaggggaatcacttgaacctgggaggcagaggtttcagtaagccaaggttgtgccactgcactcctgcctggtgacagagcaagactccgtctcaaaaaaaaaaaaaaaaaaagtgttgaattatatgttaatacgttatgattttattagtactgttggaggcttataaaatgataaagttgaaggagactgtaggatctttagttctacatttcatagctgtgagacctgagaagtactttcccagcatttgtggctatatacctatgtactggatacttggatttcaaattgtaacttaacaaacatattatctcactcctttcttacgactctttatacatagattctttctaggactttgttattttaaaatgtccatcttttatatgattgaaggtattttagatggaaaaatcattgactctagtagccttttactgtcttaaacatcttactttttctttgaatgtcatttttgtgacctacttttagcacttaccctgccccccccctttttatttggttattaatttcccaggcaattggagtagttaatatttttttccttttaggtaaatgatacaatttacaaatctttttttcctgggaaatgtggataactgcttaatgaatgctaaataacatggagtgtttcctttgttccagatctcttttcagcctatagaactgaaaaatcggtatttttagttttagctgtgaacctttctattgaatttcagtaaggcatttttttcccactgaaactaaggattcagagtaattacagcagtgctattttctttatttgtccccgtgaaaacagtaactctccatttttttatatagaaatataattttagtagtcttcatttagaattgtggaatatgaacattttcttggtctaatgaataggtgaaatgatagcattttccctatttctgtctattattctatataagccttatatagtcaaatataaatttcatgttgtacattctgaaaagcatagttacttaaatgatatctatcatcctaaattgtatgtgtccatttcattttatattcccattttaagtgacacttactgacttgaaaatattttttatcaactctcactttttaagtgtctctgtttgcccacactcacccacatcttaatctccccatccctactccccagaaaaaaaaaaagtaaaaagaaaaatagaattgtgcagggagctctactctgatagcactgatagaattcgttgtaggatattatagataccaaaaaaattgaccttagatctccgaggagagacactgctttgtttcgtggcttgtgtaacctcaaatcctgaatgaatacctgcctagaatgtgatgtagaatgaatgttcatgtcctctcttgtgtaattctgttccctctaagttgagcaatagctgtgatttttctcaacctatcctgcttggattttgatggccatttttcattctaatacaatgcctgagtgaaaatgagtttccttatatctctgaaaaacccaatattttagtcaagatttctgattctgaaaataccatatttgacccagaacctgtagacattttatggtaaaattgctttattatatactttcaaagttgcatttcacctgtatgattacatggataagtagcaggaatcatttttcaatattgttttcttgaatctgtaaccgcttttcagcctcattacattttctgtttgtcctgctttgctaggtaatttatacatgaagttgaccaaatccttcttggtctttgggagggtgttaaattccttctcagatgtgacgtctattgttaggttgacaagtcggcttgtccttagaaggaacactggggaataaattgtgctaatgattgttgtgctgtcttctcttgctgtggttaatagtaatcatttcttttccttcctctttttctgctgcctctttctttatcttccctgacttcccatgtacttttgaatttattaaattggactatatattttttccttgctttccttttttaattttgtgatctcctgtgctctactgtcttccctacttgcttgggttccatgttgctagtttttatgttcgcacgctcattatcacccttttttgtacttcaaatcccagcagctgcccagccaggtccccgagcacagccctgtggtttatgggactgtggagagcgctcatcttgctgccagcacccctgtcactgcagctagcgaccagaagcaaggtttgtgtatgactgttttcctccctcttatctttagtctcttttttattaattacattgccgtcagcattcaagagtaagagtacagcatccaaggattatttagacacccacctttaaacaaagctttgaggcagaaaattaaagtattctgcctctaggaaactaaagtagggatgattggtaaaattatttcatacatttgtttaatctctcactgttagtatctgtatacagtttaaaggttagctgccttaaactgccctttaaaacaaggtgggaagtggagggagaaatcctagcatatattactttacaagaacaatacagtttagcttatatattcagcatgtccctaggtatcttgctattttaaaaaagaaaaaaagataaaacatttcttcttacaagtttgggcttctatagccacatttggagatggagccaagttccaatcccggctccatcatgcactagttatttggtcttgattgagccactgaccttgtgtgtctcagtttcttcactgatagaatggaataaagacctatgtgcttgacaggattactgtgggaacatgcctatcacaggaaaagtgcttagtaaattatagtcattaatgctgtattaaggaatagtacactaaggtctctgctcctattgaacttgaacatgaaggtgccaaatgtttgttgaaataaatactgtgcctttgggaatataatagaaaacttaaaggaaatctaataccagaaagtgggatatcatagtctttctttcctgcctagttgtattttaacttgacctttgctaaaattgagagagaattctaaacatagttcggggaagcaagtaactttgaccctgctttatgtttcagatttctaaaaatgattggatatcaatatggaagccatgtaccttcttactttcttgaattatttattcctccaaactatttgtttattctatagctctatagttagtatatagattttctaaaaattattctttttttttttttttttttttgagacagagtcttgactcactgcaacctcctcctcctgggctcaagctattctcctgcctcagccgcccgagtagctgggattacaggcatgcaccaccatgcccagctaatttttgtatttttagtatagacggggtttcaccatgttggccaggctgctctcaaattcctgacctcaaatgatctgcctgcctcagcctcccaaagtgctgggattgcaggcctgaggcaccatgcccggactaaaaattatcctttaaaaaatatttaggaatggcccataaaatagatatatttaatattaaaggtttttgggtagactgcaagttagtcaatcacatttataaactttctgaaagatgtacttctaatacatgatttcattgatttttacatcaaacaaagattatgatatgtgtttttagtatagaaatttcattttccccctgagtattgagaagcctgatactcttgaacagacaggtcctatactgtatttgttatataagatagttttaaaccaaaagatagttagtgatccctaatgtggcatgcttcaaaaaactgcactgtcaagaacttctttcagcaacattttgagttaaaggagaactcctgcatgcttcaagcgaattctttaaatagtaaagccatttaccttgcgaaattacagactgtagaccaaatgtggaagtcgacttgctaccttcaatgataaagtcgttttgagtcaaaattcggaatgtttttaatcttagtggagaataattctcagagtatttcccttcaaaacttcattgcactttcgcaaatgtgtaatctttttgctggttagaattatgctaagcatattgaatacttcccatgcaaagaggccttaaaatatatcttctgtgcagactttctctgtagctgtgccaggatttttaaaaaatttatcacatactttgatgatgatagttctgtccttcctgaagacagtattattgcgtttgccattattttgtgaaaaataatgttaaaatttttagattatgagatccctgcattttgtcatatttaggcccagatttccagacaaggaatgcagacttgatttcctctcaggtttttgtttttgttttgcttagtggaaatttgaataacaacatcaacatatctaactggtgtataatataggcttaattggaaagtattcaggttaccttgatgaaaagaaaaacttgtagtattttaagtgcatttcagaggttataactaatgctctggaattactgttatcttccttttagtaccaactattcaccagaaaactaactctctttctttgtttctctgtttctcccttactccctttctctctccctttctctttctttctttctttctcttgctctctcgttctttctttcatctctctctctctcttttttctttcttggctagtcaaacagtaacatttctaatttcttccatagcctgccgatagctaaaatattactgttttcagagttttttttttttaaccaaatttatgtaatgttagaaagggctcactatttttttcagagaaaatggttttttttctttacactgaggatttttttttcttttttcttctattttgagacagggtttcgttctatcacccaggatggagtgcagtgacacgatcatggctcactgcagcctccacctcccaggctcaagcagtcctctcacttcagcctcctgagtagctggagctacaggcatgaaccaccatgaccagctaatttttgtatttctagaggcgaggttttgccatgttgtgtaggctggtctcaaactcctgagctcaagcgacctgcctgctacggcctgccaaggtgctgggattacgggagctacctcagccagccaaggagtttttaaaaatttccttcttcactgtagattccttttgaaattagcatataaaaactgacttttctcaaagattgttatattactcccagaaacaacagtctctacattttgcagattgtttttttctttctcaatagaaatgtctttactgagagtttgtactcagttacacaatctcatgttaactctaaagtctccctcctgcttgattgacttaagtacttctgtttccataagcctcccctttcctccaaaaagttggaagaatgtgggatttgaaatcattctcagacttgagcacttgctacttatatgactttgggcctgtgactgatctctaaaaccctcagtttcctcatatgtaaaataggcaaataatttctaccccaacaatcgtggttgtgagaattaaaagggacaatgtatgtatggtatttgacccagttcctggcacataataagtgcttaacaaatgttagctgccattattaagcttccggtttctcagagtttttgacatgaagagctagaatatttacatgaaggccaaggttccagacaaatctaccattttacatttgtttggcaccttatgaagacatagggaatacttcacattggtttgtagagagaacaactgttgaatgaattaaaatttttgcttggtattgatagtacacagctgaaatgattgctatttactgagtgagaaagaacattaaatccattgtactgaggatatggtatggataattaaaggagttagttggtgccttagtcttaatcttagtgcctgttgaaagcacctagtgtgttcagtgaatggtattctgtttgtaattcaaccattcatagcagtgttgttcatttgggactctgctggcatttaggacctattctttgtcaagtgagactgtacctcaaattgcaggatgctcagcattcctctctctgcttattaaatgacaatagcatcttctcagtcattgagagacttgtgacaaccaaaagacaacccagtcttggtcattgattccaccaccatatgagaataaaagggagcaattttattcttcttataaatttggcactctttatggaaactacagctaagcaaaatgaaaaagtatgtgtctgattactcagagccattattaataagctgactttcccctatgcacatatgttagtactaagcatttttttaagttaccaaattgggttctacatagagttttgtgccccactaaaaacaaacaaacaaacaaacaaattcttgccagatgcagtggctcacgcctgtaatctaagcactttgggaggacgaggcaggaggattgcttacgaggcaggaggattgcttgagctcaagaattcaagaccagctgagtaacatagcgataccctgtctctacaaaaaataaaaatattagccaggtatggtggctcgtacatgtggtctcagatacttgggaggctgaggtaggaggattgcttgagcctgggaggtggaggtcacggtgagctgagatcacaccagtgcactccagcctaggcgacagagcaagactgtgtctcagaaacagaacaaaacatatcttttattacaaacaactttccatatcattaaatactcttttaaaaacatattttaaatattgcatagtatgccattatatgcccagattatcatttctttaataaatctctattgttgaacatttagttgatttccttttttctccttttttcttgtattataaatagtgttgccttaaatattctagacatctatctttgctaaccctttcatgattattagaaaaattcttaaagctggaattcctgcaaattcctaaagatggccaaactttttataatagaagtctttagagggataaaataagtgtttttttttttaatttagctctactgtgtttttagctttctgcattttcagctttctgtattaaagctttaattagtgggttaaaggacttttattttagaatgaagaactcacaatttgttttgttttgttttgttttgtttgagatagagtctcactccactgtatcacccaggctgaagtacagtggtgcgatgacagctccctgcagcctcaacctccagggctcaggtggtcctctcaccttggcctcctgagtacctgggaccacgaatgcacaccaccatgcccagcttgtagaaatgaggtcttgtagtttgagacctcctgggctcaagtgatcctcccccttggcctcccaaagtgctgggatttacaggcatgagctcaccatgcctggcctaagtttttcaatactagatttttctgaagtgtgtatagaagtttatcaatcataggtctacttttgtttgattttttactatcagaaattgtttcccaacattaataattgaattgacatactcttattagatatttaatgtgagaatcaatttctctttttctctctctctctgtccccccaccccgctccccctctctccttctccccacttttcttttccctttttcattttgagacagcgtcttgctctattgcccaggttggagtgcagtggcatgatcacagcttgctgcagcctcgacctcctgggctcaaacgatccttccatcttggcctcccgagtagctgggtctacaggtctgcgccacctcacctggctaatcttttaattttttgtagacaaaaggtctcactatgttgccgaggcttatcgcaaattcctaggctcaagagatcctcccgtctcagcctcctaaagtgctaggattacagatgcgagccatcacaccctgccctatttttaaatttactgcatctaggtttcagtcagtggtcataaagggtgttagtctgataagctttcacagtggtattatgtaatctgggtgacttatttactccagtgagctggaaattattttcatcaaagatattttgataaatacatatttgttatatatggtgtgttccatctagaacgaacatacacacacacacacacacacacacacacacacacacacacacacacacacacacacacacacacacaaaaaaaataaagacaagttttcctgaaatatttttgtctgttgccctgtcaacttagtctgagggatttggcaatgagagcctattgattctatttcatcactgcagtaactaagaaaagtccaattttagaagcaccagcttctgtgcctataaataaaagtatattttaaggctaataagtgtcattacagtgaatgaattaataatatcttaatggtaatatttaatacctatttatctgataaactgcatatttgctttcacataattacaatttattgtaaagactcactttcattgatgtataaaaaattctgttggagaaagtagtctcagtttaggttgtcttttaatagtgcttgaatcttttgttgtcatttgataaacatactcatgagtatatgtttttccatggagcctgtttattgtgctaaggaagcacaaggctggaagccagtctaaatctcctttggtttcctccactcagggatgaatcacatatcaatttacctggaatttattaataaaaatgtggaaattattgttaattattgttccttgtgtttttctggtacccgcattatgatgaccagcttctcttctctctccgtctcattctctctatatatacacagatgcatttttgtatattatatcaaactatttcatactatgaaacactagtattttcatactatatgtatattgttttctttttcattggatttattcgtgtattaactttgttttctccttaattgttttacatgtaaagacacaagatatattttgttttttttgttttgtttagagacaggatcttgttcagttgcccaggctggagtgcagtgatgcattcgtagctcaatgcaacctcaaactcctgggctcaagtgatcctcccacctcagccttttgagtagttgggattacaggcatgtgccaccaagcccagcaatttccatttttataccttacattatttctggttatatacttccattgagaattgaagggtaaattaatttagaaactgatttttatcagttactgagaatagtttgatttcactgatagtaaatttcattaaataaaatgtgatgctttatcttgagtttttatacaagtaatactttttaaaataaaaattatctccccaaatacaaaaatatatagaataaaaaataacatcagtccctttataataatttaatttttaattgtttgcccttgtactgttttgccactgtaatatatccttggaaaaaaagttttttagggaacgagaagtggtagaaatgaaggttttcctaccttaaagaaaagcctcactcttaaaccaagaatggtttagcctcagttttggtgagcttttcagttgtattcttgatatataattttttggtgaatagattccttctcttactccaaaacagactttatgtattggataccaagtaaatagtaggtttaagtaaaaaaagaaaagagacaatgtttttggcataccagaataagtctaatatattggtctctgttctgttacctgtaatttagggtaagacattgaaagaattggcccaaggcaatatgtagtctctgatccaagaattattcttaaaacttatttttttttccccagaggagaagccaaaaccagatccagtgttaaagtctccttccccagtccttaggctagtcctcagtggagagaagaaagaacaagaaggccagacatctgaaactactgcaatagtatccatagcagagcttcctctgcctccatcacctaccactgtttcttctgttgctcgaagtacaattgcagcccccacctcttctgctcttagtagccaaccaatattcaccactgctatagatgacagatgtgaactctcatccccaagagaagacacaattcctatacccagcctcacatcttgcacagaaacatcagaccctttaccaacaaatgaaaatgatgatgatatatgcaagaaaccctgtagtgtagcacctaatgatattccactggtttctagtactaacctaattaatgaaataaatggagttagcgaaaaattatcagccacggagagcattgtggaaatagtaaaacaggaagtattgccattgactcttgaattggagattctcgaaaatcccccagaagaaatgaaactggagtgtatcccagctcccatcaccccttccacagttccttcctttcctccaactcctccaactcctccagcttctcctcctcacactccagtcattgttcctgctgctgccactactgttagttctccgagtgctgccatcacagtccagagagtcctagaggaggacgagagcataagaacttgccttagtgaagatgcaaaagagattcagaacaaaatagaggtagaagcagatgggcaaacagaagagattttggattctcaaaacttaaattcaagaaggagccctgtcccaggtaagccattctgccattaatctcgtgcttgctgaacatgaagaagaggcagtgtttgagttattttttaattggctactttccttgacttccagaaacatcgaatgaatgctgaaattcctagtctggtttcttcagtggtgtgtttgtgttttagtacaacctgcaaaagagttactccattgtctaaaaatgcaaatgagaatttccaaatatacaaaatgcctccaaggtatatgtcacgaaacatgttgggttttgttgttgttgttgttgctattgcctcattcatatgaattggtttctcaatgcttaattttgctgctttggggctagaaaacaaaaaaccaggatggtctatagtccctaattctgtcttcctagaattttaaaacccagtcaatcctaaaggaactcttctatgcatgaccagtttttaaatcttggatgtaggaagatagcaatcagaacatcaaaggtttataactatttttgaaaatataatgctgttgttgattcacttgcaggtaagcttaacgttctctcactttgccttttgaaacagttttattttttgtgtacatttttacatggtcattaatatccttggagtattatattcttcccagttcaaattatttctttttaatgtagcatcacctgggaccttaggaactaaccattgggttattgtaagtttaatcaaaagttatctgaggcttatcagctattctaggataagttagcccataggaatattgaagttttggctttgaacaattcagcacagcctatcttctgcaacattgccctatgctatataatttcctttctctgtgcctgtcagattaagtaatgcgtatgtaaattgggctttttgataaatgagtgctcctccagcagttgatccttgacatgcagtgaataggttttggtcaccatcatcctcagtatttttgtctattttgaggtgtataataaggaaatttgacaaacccaaaagctgatccctacttttgagatgtggcttttctacccagctcagttcttgagacaatttcctcatcagtgtctgtaagaggtgtctggccttttggaactgcagaacatcttgtagaacaccatgagccagcacaggaaagaaaacaatgcaaggcaattggaacagtgagaaatttttcataaatctttgtaaattacctgtttcctcaactatctggcttccattgacatcagtattcatagtgccatcactgttttaggaaacttgttccttggtggagagatgaccttagaccttgttttgtcagttaccctttagaaaaacagccttggggccgggtgcagtggctcatgcctgtaatccctgcactttgggaggccgaggtaggtggattgcctgagctcaggagttcgagaccagccttggcaacacagtgaaaccccatctccactgacatacaaaaaaaatagccaggcatggcagtgtgggcctgtagtcccagctactcgggaggctgaggcaggagaattgcttgaacctgggaggcagaggttgcagtgagccaagatcgtgccgccacactccagcctgggcaacagatcgagactccatctcaaaaaaaaaaaaaaaaaaaaaaaaactaaacaacttggtgttggtgtggctgtaggtaaatgccctccgaagaaacacgtgtttgttggagaacagtaatttgtttgacacttcaatgttcattttcatttgtagtgatacgatagttacaaaaatgagagaaactaatgaacaaaaatgtttttaaaatgtaaaagcaaagaaaaacaaaacaatcataggaaatataagttgaagatacaaaccatacctcagaattgaaataagtgtaaagtgaaaagaccatgcatcaaaatcatacttcactcatttctgacatatattctttttttaaacatcagtttgccacttagatgacctgatattgcaagacagtgcccagggatggatgggcaaacagaattttggtttaaataatgttcataccatggtacatttgtttgaaatgcagatgctctcaatattagtattgtgaacaccagcaccttaatcaaagagtatagactcttcagtggtaatccagagagcacttagaaaagaaagaactgtttttttaatgacttggaataacagaggtttgtgatgttgggaggtaaagtttcttggcatttttctagtctcctgattttttaacctatgtgtttaagggaattacaagttttataatttccttgtacatcttaatagtcttcaaaatccaacagtaaatgaacttcaagaacccctgcaactctagctttttttttttttttttttaattttttttaagatggagtctcgctccatcgcccgggctggagtgcagtggtgcaatctcggctcactgcaacctctggctcccaggttcaagcaattctcctgcctcagcctcctgagtagctgggattataggcgtgtgccaccacgcctggcttatttttgtatttttagtagagacggggtttcaccttgttggtcaggctggtctcgaactactgaccttgtgatccgcccgcctcagcctcccaaagtgctgggattacaggcatgagccaccacacctggccagcagtttgtaaattataaagcctcagaagcatttctgacccattcatttctgtccgaatattttttaatggttttgtcacaaaagttaacaatgaaaattaaaattacctccagtctttaagtatatccacctgacgtggtcatatgcttaatgactataatttatttgcacttattcacataatattcacttattataccttgtttactttgagaagttagtaaatcataacagccgtttactttgagaagttaataaattgtaacaccaaaacagtctggtttgcctatgagtcttttggtggtgacttttgagaatagtttttacttgtctctgcctgaggatgaaacacctcaaagctggcttcagaaacctgatacataaataacatatcagttggtatagagatagttggttaaagcagtaaagttataacataagggatatggtatcttttagttctgctgcaaaacattttcttgtaactattctagatcatatttctgagtgaataaaaatgcatcagttgaggccgggcgcggtggctcatgcctgtaatcccagcactttgggaggctgaggagggtggatcacctgaggtcacgagtttgggaccagcctggccaacatggtgaaaccccgtatctactaaaaatacaaaaattacccaggagtggtgatgcgcctgtaatcccagctattctggaggctgaggtgggagaattgcttgaacttgggagatggaggctgcagtgatccaacatcgcgccacttcactccagcctaggcaactgagcaagaccccatcttaaaaaaaaaaagaaagcatcagttgttttcggattgaagaacaagctctgtaaaattagaatttggtgtgtatatatcttcagtgtactctgaaaagcctcagttattggccacacttttaatatcaccgtcactttagtaattaaatgcataaaactagatattaattggatgatatattaaagtcttgggaatttttattgtttattctctgtatctggtgggaggaaaaaggagtgttttgaacttgtgggaaagcattccccattaatcatccaggagtttgttttctacaattttaggaatgtatatgatgtatagtatgtaacattaactttcccactttttaaaagaattgtgacttttttattttattatttttacctgtatcagatataaaaccattatttaaattttcttaggcagagggagatttctaatttttctatttattttgtttttttggctcttgcttatagtacatttttaatgtatattttgtaagtttgttttatgaacttatccagataaattttcctggatgtagattgatggcaagttattctaaagcagatttgtgtttactttatctgctgcatgtcttggggaaagcatttgctggaactaaatctgggtttaatgtttgttagaactaaatctgggtttaatgtcctaaagctacagttctatcccaaagcctaaggacagccataccgtatggcttggatactaattttcagggtaacagcaatcttctctccatccagttgaaacaacgtcctttctcatcatcactgtgttggttcagtggtttattccctctctctcttttttaagctatcttttcactgagcatgtcacccatttgggagtctcagagctttatgtgagcatctcagttccaggttcccactttgcagggatccaagatctctcttttcttatgggtgttaaaaatacaaattcattggttatagagactggcacacccttctacacccccaggaatgtaaggatggcatcagccactgacctgtagtttaccttatattctcgtaagctcagctaaggatgtagaagggtttccagattctgtagaatataacataggaagtttatttctcaaatggagatacgattatatgttttggtaatgttaacaaaatactgatccatgtagccaatcaagttgctgctttctcttttagtttagacttactgaagtgtaaagggagcatacttcagtgcaagaaaaatattttaataacaacccttgctttattctcaactgtgagagtattcagagtactttcaaagaaataaacatagcaaacataaaaccagagatataaaagtctatcagttttcctagattaaactaaaaatgactaatcttttaaataataaaatttattctaacctttgctcaacttacatattctaaaatatatttgaaatatctctggaagatttagtcgctggggccaaaagtagattgccaatggtttgagtatcctgttggcctaatcactatactactatgcatccttataatttagcttctacagaaacgtgttctggaaacatggaaacaggactccttacacattcctggttctttgtcatctaccaaaacaagcagagtgatccttaaagcaaggaccattggcttcagttttcagaggcttgagtctgagtgatccttagggataaataaaggttttctccaccttgtttgtaaactgtttccaacaaagctgcctaaaaggtatgtttctgccatcccattcctattttcttgtttccctccccagtaaactcttaggcattccttggaaaatactgatgctggtcaaattcttttatatactgcagaatgagcccagacacctgttagttgagcctgttggcaagtcccttacgtagttcttccttgcctctttatgtgggatagatttccccattttttacagtagttcatgtctttcatcatgagccctaaagtctcagtcattgggtattaacttagttctacatctttctgagtagttatactttgttcaaaatgtagctcccttttccccacatttagtaactaatcctcctccatgacaaaggactattgtactgacctgcttccagagaaggtaattcagtcagcctagagctgtgctccctcagtcttttaaagaaaacctctacaggaaaacctagtcttactataagttttccctttctctaatatccatcattaccttgcacacagttgccttgagaacttttcctgattgccttggaaaagataactttccatgttcctaacacaaagaaatgataaacacttgaggtgatggataccccaataaccctgatttggtcattacacattatgtgcttttatcaaaatatcacatgtaccccacaaatacgtatgactattatgtatccttaaaaatttagaattaaaaaataaaagcacaagtatgccaaaataaggaagataagtttagtaagactttattaagaaaaaagataattctctctactaatgcataaaaatgcccaaaatacatttccttcaatatatttcttttcttcattttctattactgtattaaaatacttggtaatttagtcacaatcataataaaaattattgtacatttttctgtttccaaaggctttcccaggcatttcaagcattattcttgtgatttgaacagttattcctggatatagttatttctgttttgctgatgacaaaaataagcctcagaatggtaaatcagctttctcaggctcacaggagaattacagccccttcctttatacgtcatgtttctattaatctttcagagatggtatgtcaatacaaaattacctcaggatttgacagttatactttatgcttgtgacctaggttcatagtgaaacatgaaagcccacctgtttgaaccacagtagttactgaaggcctactgcgtgtcagtcattgttccatgcacttgagatttatgaatgagtaatacaaagatccctgccctagtgatgtattaggaagttttaagtgctgtaaaaataataaaacagggtgaggaatgcaaaggggcagcaggttgtagtatttaaataatatgatcagagtcataggcctcagtaggaggtaagatttgagcaaagacgagggggattatttgagctaccctgtacaaaatctgtgattttcctctttttccttttgaaaaacatacctatcaaaacccttgaatcagtactataactcctactttgtctattaaactccagtaggcagagcactactggagaagatcacaccacttacagtggtgtgaatgcaactacaaattcacactgtccatcccaaccattatttttatggtttttctgttgaaaatcctttactctgcccagtgctactcacctgcagcacatgacctcgtctccttctttattgagaacattgaggacactgggtacgccttttttttaactttctgcccccttacaaacctggctatattgaaaccttcatcagactctcttagttgtctcttacagtctcgtatgtattcactgcctctctaccaccttcttattgtctgtctcatgccagagacgctctctgagtcccatataaccatttagctgccacttaaatggtatctttttcttctgacccaaactgtttaagaatagtctaccatgtcttctactattcttttcactattcaactaacatatagtctgatttatgctcctaatatgctagtggaatcttcctcagcagggtcatcagtagacacacatttatcttcctagtctttttgcctcattttaccactattggtctctttctctctctcttttaagttaggtcgagtgtaatttatatgcagtaaaattcacccttgttagctagcattcatttctgtgagttttgactagcacagaaagccatgtaatcacaccagtcaaaatataaaacagttccatcagctgggcgtagtggctcatgcctgtaatccccacattttgggaggccaaagtaggatttccaaatttttatctctgtcccaactcctcctctaaacttcaatcttaaatttccaattatctgacaaatatctccacttgcagagtcatctcaaattcagtacatccaatactaaaccagtcacctattcctctaaacctattctttcatctcaggttatacactggctttaattaaactaaaaccctgaagccactgttgacgaacctcccttttgagtccccttttttcccatccagtcatttcacaaggtgccctgtttttgtttttgtttttccccccacaagatagagtctcactctgttgcccaggctggagtgcggtggtgtgatctcagctcactgcaaccttccgcctcccaggttcaagtgattctcctccctcagccccctgagtagctgggattacaggtgcgcaccaccacgcccggataatttttgtatttttagtagagacaggatttcaccatgtttgtcaggctgatctcaaactcctgaccttgtgatccacccggctcagcctcccaaagtgctgggattacaggtgtgagccaccacgcctggccggtgccctggttttatctaatgtatttgtgacatttgttccctcctctccatttccttcttcccctgccttatccctgcacttaggtgtggatgcttgtcatttccttggtcccagttttgcccccacttgaaattgttctccaccaagtggccgaaatcatcttttaaaaatacagatctagctttgtcactcctctttcacgtctttttaagctcttcaggatgctgtgaaggattgggggaaatatcctgcaagatgaactctaaacttctcaagttttaccaccaggtcttctggtatccatatcctctcatacctctgcatcgtcagctacagtaatccaccagtgttctagaagcctggagattatttcaaaagcgccatatagtaggagtcttctgagtatacgggcatacctcattttattgcacttctctttattgtgctttcactgatacggttttttttacaaattgaaggtttgtggtaactctgtgttgagaaagcctgttaatgccattttccaacagcatgtgctcacttcctgtctctgtcacattttgataattctcacagtatttcagacctttcattattataggtgttatagtgatctgtgatcagtgatctttgatgttactgttgtaattgttttggggcaccacaaaccatgtaagacggccaacttgatcgagaaatatgtatgttctgactgctccaccaaccggcagttcttccatctctctccctccctcttcttgggccttcttatttcctgagatacaacaatattgaaattagggtattaataaccctgcagtgacttctaagtgttcaagtgaaaggaagagtcatacgtctcccgcttgaaattaaaagctagaaatgattaagcttagtgaggaatatgtatcgaaagctgagacagagtgaaagctaggccccttgagacagtaaagttgtgaatgcaaaggaaaagttcttgaaggaagtttaaagtgctactccagtgatcacacaaatgatacaaaagcaaaacagcctttttgctgacatggagaaagtttcagtggtctggatagatcaaaccagccacaacattcccttaagtcaaagcctcatccaaaacagtgccctaagtctcttcagttctgtgaagactgagtgaggtgaggaagctgcagaagaaaagtttgaagctagcagagcttggctcatgagattgaggaaagatgtcatcataacgtaaaagtgcaaggtagaagcagcaagtggtgatagagaagccacaggaagttatccagatgatctagctaagataattgatgatagtggctaccctaaattacacattttcaatatttgttgaaaaccaacagatactgatattgtagatgaaaccgccttatgttagaagaaaccatctacctactttcttttttttttttaagacagagtcttgctctgtctccagcctggagtgcagtggcaccatcttggctcactgcaacctccgcctcccgggttcaagcgattcttctgcctcagcctcctgagtagctggaactacagatgtgcatcaccacacccagctaatttttgtatttttagtagagacagggtttcaccatgttggccaggatggtctcaatctcttgaccgcatgatctgcccaccttggcctcccaaaatgctgggattataggagtgagccactgcgcctggccccatccagcactttcacagtgaaagagaaggggagaagtcaatacctggcattaaagctacaaaagacaggctgactctcattaggggcttatgcagccggtgacttctgtttgaagccagtgctcatttaccatatggaaagtcctaaggcccttaagaattctgctaaatctattcttcctatgctctataaatggagccacaaagcctggatgatgacacatctgtttgcagtgtggcttaccgactcttataagcctactgtagagacctactgcccagatagcaagattcctttcaaaatactactgcacattggcaacacacctagtaacctgagatcaaagagtaattttgactttcaagccttgttatttaataagtacattttgtatgtctatagctgccatagatagtgattcctgtgatggatctgggcaaactaaaaacctcctggaaatctgatttgttcgtggcatttgttccttcctcttcatttccttcttctgccttagttagccctgcacttatgtgtggatgcttgtcatttccctggctccagttttgcccctacttcaaatttattctccaccaaatagccaaaataatttcagcattctagatgccattaaaaacatttgtgggtgcagtggcgcacgcctgtagtcccagctactcaagaggctgaagtgggatgatcgtttgagctcagaacttcaaagttcatctgcacaaaagaggagacacctcagcaagattcctgtctcttaaaaaaaaaattgtaattcatgggacaaggaggttaatatatcaacattaataagcatttggaagaagttgattctaaccttcatggacaactttgaggggctcaagacttcagtagaagaagtaagtgcagatgtgatggaaatagcaaaataactagaattagaagtggagcctggctaggcatggtggcatgtgcctataatctcagcatttgggaggctgaggcaggaggattgcttgaggccaggagcttgagactagcctgggcaacatagtgagaccccatctctaagaaaacaaaaacatagaactaaagcctgaaaatgtgactcagttactgcaatctcatgataaaacttgaatggataaggagttgcttcttcatgggtaagcaaagaaaatggtttcttgagttggaatctattcctgttgaggatactgtgaacattatagacatgacaacaaaggatttagaatgttacataaacttagttgataaaacagcggaagggtatgagaggattgggtaaaatgctatcaaatagtatcacatgatacagagaaatcattcatgaaaggagcagtcaagcgttggagcaaacttcattgttgtcttattttaagaaattgccacagccactctcatgcctcagcaaccaccatcctgatgagggcagcagccatcatcatcaaggtaagaacctccaccaacaaaaagattacaccttgctgagggctgagatgatcattagtattttttagcaataaagtattatttaattcagataatatgcattatttttagacataatgctatttcacacttaatagactacagtttagtagaaacataacttttatacgcactgggaaaccaaaaatttgtgactcgctttattgcaatattaacttcattgccatgatctggaaacaaacccacaatatcttcaaagtatgcctgtgcctacacaggcataggatctgaatgtagtttttcatgtatttgattaaacactggcagtaaaatttagtggtaagatcaaagcaacagcatcaaacactcctgagtcttaccctttttccttgtctatctctgtgaccatgggtgaatttcctaacctctttgagtctgtttctcatctagaaaaatgaagataataatagtatttacattatagaattgtaaagataaaatgtgatgtatgtaaagtacttagcacaacatctgacacatattaagcactctgaatgttaaataatattgataattctattttcagcttgtattaagagcccaaatgttccctttgaactctgctaatacacagaagagttggatatcatgatctttgccctgaggaatttatcttccaaagaaaggaagctcaaggagttgataccttctgaaatgtttttaataaaatctgggacatgagatggtggaaaatcccttaggataggccgtttgcatgtataatgttgattaaaagtttttgtacccattatgtcatttatcttcacagtagacacatctcaaggtgacctctgctgtgattggtaaaggagaaggcctccttagaacagtgaaggaaaatctgtagttgagttgaggatggtaataccatcattaacttcctgctttggcaggagtggaaaattaggaagaaaggcaaagaaagctcagaagaatgggggggaaaatgaatagggcagccataaagtggtaacaacccaaatcagtttatcaactgatgcatgaataaacaaaatgtgatatatacataccatgaaatatcggaccatgataaggaatgaaattcacatggtgtacaatggatgaaccttaaaaacattacgctaagtgaaaaaagtcacaaaagaccacattttatatgattccatttgtatgaaatgtcaggaataggcaaatccatagaagcagaaaataaattagtgctcaccaggggttggggagagaagagagtggggagacggtgctaatacataccgagcttctttctggggtgatgaaaatattctaaagttatatagtggtagtggtcacacaactgtggttataccacagaccattaaattgtatagttttaaaaggttaattttatgatacgtaaattatatgtcaacaaatattacatatatattttaaaaagaggggcctggcgtggtggctcacatctgtaatcccagcactttgggaggccgaggggcggatcacgaggtcaggagatcaagaccatcctggccaacatggtgaaacctgtctctactaaaaatagaaaaaaatagccaggcatggtggtgcacgcctatagtcccagctactcaggaggctgagacaggagaatctcttgaactcggaaggcggaggttgcagtgagccgagatcacaccactgcactccagcttggacaacagagtgagactgtctcaaataaaagaaaaatgagtatgatatggtggtgccaccagcatctatataaggatttgcttagggaagttatagcttagaaattgaggaagtaaatttcaacaagaacaccacaattgacagtatcagagatacaggagtatttgtgtacagccaaaaattatatcatcttttgacacatgctattgttgtataaataaatttatacaacaattacttatatagtgtatacataaaaactgtattgtttttattctgtcttattactttactactagttaaattttacctcagtttgagagggtgttctcagcttggtattgaatgtaccacctgtagagttcaagaccagcctgggcaacatatggagacctttcgtccctacaaaaaaataaaaaattagccaagcatggtggtgtgtgcttgtagtcccagctactctggagactgagatgggaggattgcttgagcctttgagattgaggccgcactgagccatgttcacaccactgctctccagcctgggtgacagagtaagaccctgtcaaaaaaacaaaacaaaaaacacctgtagcaatcattctagaggcattgctcgatgtcacagatatgaaatatccagttgggccggcaaagcagagtggttcttcatgatcagaacataagggatctgtgttttggaagtagtgattctgctgtttctttgtttgtaacttggtcccttatgtttttggcccagttcagccaccctctgtaactcttccttcaactctcctacctgagacccttctggatctgtctcttctttccagctatctaaccattcatttattcacccatctgttcaatccccatttcttttcactccatttcacagactgtcattatcttacacctcagctattacaactctgctttcagacttctctggaaaagtaaagtgcacattttccagaaaattctttcagagaaaatattgctgctggatgccagatatctgtctaagacctgtagaaatagtcgtttcaagggtacaagatccaggctcccagattagccttgaaactatcattatttcatcctagctttgcttaatattattttttaatctttttgcaaatctcccacacctgtttgatgagtgttaattcctgcattgtttccttgatgctgtcttcaacctagaccacattaaggaacctgctcaattcagttagctgggtgtggtgcctggcacctgtaatcccagctactcaggaggctgaggcaggagaattgcttgaacccaggaggcggatgttgcagtcagccgcaattgcaccagtgcactccagcctgggcaacagtgagactccacctcaaaaaaaaaaaaaaaaagtatttttttcaatttttcaatatgactctattcacaaggttttctattctgataattcctcgaacccttaaacatataattatgtcaatttaaaatactcgtagtactttatgcatattgatatgtgtacattttacctctccaacttcttttacatctccaggattagtaaagcttttatttttctgttatccccgagagcttttattaaatgtttatttactcatttctgcaaatgtatagatttgtgttgtttttgttgggtttttgttttgtcttgttttttagggatctgatagtaacaaatcaggtatatttaaaatcaccaccctggtaagaaaaaattgtagtttttttttttttttcttttcttttttctgagacagggtcttgctctgtcacccagactagagtgcagtggcataaacatggctcactgcagagttgacctcctggtctcagtcttcccacctcagccacctgagtagctggaaccacagatgcgtgacaccacacccagctaactttttgtagagatagagtctcgccatattgcccagctggtctttaactcctggcctcaagcagtcctcctgccttggccttccaaagtgctggggttacaggcatgagctaccatgcctggcctgttgattttaataatagtagctatcattgattaaatgcttgctatttattagacactgtggtcagttctttaaccctcacaacaactcttatccttactttacagaagaggagaatgaggcatggaggagatgatacttgctgaaggttatatagttaataagtggtagaatcagaattcaaatttcaactctacaatttatactcatagccacgtctttataatattgcctctcaaattaagctacatatcctgtaaataaatcttagacttcagcattcaaaagttaaaatcatttaaaatagttcttactaaaataagatatttttatatgaaagatgaatatatacataaagctacagctggataaacaggtagatgataacaagggatacaaagtcaaatgtgctcaccctgaataattaggaaaagcaaaaagcacagaatgtatctttcccagttcattagttaatacctctctccaagtttctgccaattccagaattcatgcatgtaacctcggaatcaccttaatacttaatgcagtgtttaagaaataaaagtaggctggctgctgtggctcacacgtataatcccagcactttgcaaggctgaggtgagaagatcacttgaggcccagagttcatgatcagccttggcaacagagagaccctttctctacaaaaaatttaaacattagccaggcttggtggcgcatgcctgtagtcgcagatactcaggaatctgggacagaaagattgcttgagcccaggagttcgaggctgcagtgaggtatgatggtgtcaccacactccaacttgggcagcatagcaagaccctgttgctaaaacgtatagaaataaaaatagaagtcattatttatgtgatagcattcaatgagatgattaatagcatccaaaaactattagggcttttgtaacataataccgttattaatagttgtcattcattcaacaggtatttattgagtcccagactgtcataatttatattagtttttaacagaattcaaataagatttgagtgatatttgaaatatttaaatcagtatacctgatcatgtagggaaaacctccctttgacatgatattatacactgatgttccataaattgtataaatcatgaataacccctaaaacatggcttttctgtatatcttacaaatgagttttactctaattttaaagccataccaaggtgtaaaacagtacgtatagtataaataaaggagaaacctgtatgcacattcacatgtataatgcacacatatatgtgcttgcatatacaccagtattttctgaggataagtaggaaatacttaataatgattttctctggggagagagacctaagagcaagatggggaagacaagactttttcagtttttcctcgtttgttgtgaaatctttttgttcatatgaattacttttgtcataattaaagccagaagcaagtttaattataaattttgcagtaatatgtgtcttaggtctcattcaaataataattttcgggtgggtgaggtggttcacacctgtaatcccagcactttgggaggccaaggtgggcagatcacctgaggtcaggagttcgagaccagcctggccaacatggtgaaaccccatctctactaaaaatatagaagttagccaggtgtggtagtgcacgtagttccagctacgcgggagactaaggcaggagaattgcttgaactggggaggctgagttggcagtaagccgacatcgtgccactgcatgcactccagcctgggcgaccagagtgagactccatctcaaaaaacaaaacaaaaagaacaattctctcatgatttatctgatatatgtgaaacatagattgtcaaatttcgaaaggtacctaccagtctgttttgaatgatttctaatattcctcaagatttgcagtgcctcacttcttattaatatcagttattcttcagtaatataaatgcggagaacagaaatatttcttaagaatttattttttgtatttctgataccatttgtatcatgatgttttcattagagtgcagaaaaattccagtttttttggatataagatttagtattcaattcaacaaacatatcagcagataaagttggaataaatagatgctgacagttctttaaatttcaataacagactctagatcttctctaaaatgtcatgttaaaatgagttataaattagaatacccttttgactgcctattctccatattttgggacacattagagaagatattcaaactggaaactgtcatggaaaaccaagaaatatgaatgacttaaccatgagtttttatgatgtgccaaaagagatgtgataaatccatgcttcactatgtttggtacaaaatccagaattaaattggttaatagattgatttcatttgttctggcaatgctaatttatatctaccatgtgacaggcccttttctgacctctagcaccacagagatgaatgaggcaaagtctttttccactgagaacttgataattttgtagagagacagataaatatatatatatatatatatatatagggatgggtaaggtgaagagaggagggaggaagtgatggtccctgttagagtgtattttttattattcatagtagctcccacatattaaggttaaagcaaatttctctgtgctttgcagtctggtaatgtagactcactgatggtcagatggaaagtagattttttttttccatctagagttatatattcgaggcagtgagctgtagcattttatttggagatgaaaagtgttgagtaggtgtaagggtaactgtattatagtctctttcctaattaaattacatatttgtgctgtagtgattgacttttttgcatctgtactagatttaccttgaattaaattgcagtcttttttgatgatggtagaagtggttcaaaagtgtcttattaaaatgcaaaagtgcctaaaacacagagcagtaaaaacagaggcctagaagatatgccagtggtctcattggagtcatctttgttctcagtgtcgacaattgcttaatggactgtcctccactgaactttttggagcaaacctacttagtgtcactttgccattttatttttttaatgacatactgtgctgttggggcaacaaactgcacatcctgtcatgctacaaaagcaaaagacaactttaaccaagataaaaatgaagctggaattcaggcaagaaagtgaaggataaggcagacttgagaggtggggtattgagtggggaagcgttttgaagttagatctgtgtttcagttctagccccaacctttactctctgtaaaggggaaacttataatctctctgttcttcagtttcctcatctctgaaatgggaatactgtaatactacctacacaaagagatttaaccagtattgttgttctagagagacattaaccttgggtttaattttgattgcaggtcatttattcattaacagatttgccaggcactgtattggttgctgggtagattgaagagaccaacaaaatacaatccttatcctcaaagaactcaaaccctaataattattcttagcttgtatccaagtctttgattgtgtagagtagcaagggtgcacactaagtgggttggtaaaaatgttgaaactgtagagcagtaaatgggcctgatgttgaccaaaaggtaaaagccagatttctaactttgctgtgtatcagaaaccagagaagcacatgttcttaaataggtagaccttgaatgctggacgtggtggctcatgcctgtaatcccagtactttgggaggcccaggcgggcggattatctgaggttgggagtttgagaccagcctgaccaacatggagaaaccccatctctactaaaaatacaaaatcaaccgggcgtggtggtgcatgcctgtaatcccagctacttgggaggctgaggcaggagaatcgcatgaacccgggaggcagaggtggcggagatcacgccactgtactccagcctgggcaacaagagcaaaactccttttcaaaaaaaaaagagatagactttgaagctagtagtagaatcattctcatgcaagtgaatttacgtcaaaatttttggatttaagtggcactttgataagtatttgagataccaaaaattagagttcagtcaagagaaattgatgtttgaaacaagatagagaggtcttcagattctaagaagttatgttcgatatggaaataggaaaagcaggacttggagactgatacgaatataggcctaagagaacttttcaaaaagagtttgtatcagacaataccaataccaaatgctgcaaaaatacttgagtgtaatggtgaattgaaaggatgttgaatttgtgataattttgtcatttactactctgagacaaattccatcacctaagcagatataagcaccaaagatttggagaaagaatagtgaaatcaagaaaataaagatacaggtatgtccatggcagggcagaagcctggggatgtcaaaatacacactggacctgctgaagcatgatgagaaaagcagaagcaggtgcacgttttcttctactttccatgccactttggaaaagagtccaaacatttagctaagcgggggcttttaggctgcatacttaagtaagcattatctcctcacctggcaatatcagaagctggagtataatgacaaaaaattgaattcaacagtattcttccagtttagcatatatggctgtggaatcaccagctcagatcttggtataatttgagggtctggtatctagtccctggtacagatgtctcacattgcaatcctgtgacataatccatgaccttaaaatcatggtttggaatccaacagctgttctttcggaatggtcaaggactgaggtcagtttatataatgaggcacactgttggttaagctgatacaccgcttcaacactgcattcagattaatggtttctattgagccacttcttttctctttgcctaaccttgcatcaatagcacaattaccttcgttactttagttttataatatcctaatattacaagcccactacctttaaattctacatcaaaattgtattggcttttcttggcttttgctttttcatttccaaataacaacatatggaattgttctctgcacaaaataggtatttgatcaacggaaaaattagaagattttttttctttatgcatatggtatatttagggtttcatatgcattaacaattttcttataaatgtttacatcacataattcttagaattttcaaacacacccaaatataatttatacataatttttataaacagttctattatataaaataattattgctgttcaaatgagtcagttatgttgtttggaggagcaacagagaggcagacttactaaaatatattttagcagaaaaggttttgaaaataatattgggactttagctttctctataaatggatggttcctgcatttactatcaggaaacctgggccactgccattctgaaacagtatttctagagagtgaccaaagagagttggtgtaaaaatcctaaaggcccagaactgaggttaatggggaaaaaaaacccaagctctcggtggaagttttggtcagaataggagatgaaacagagtacagtgagaatcaggtagcttctgatcagtaagaaagtctaccatatatgttactggaatttttaagcctctttctcttagaattctctcagttcctattacatggtagattaatcgaagaaagtcattctgacttcctgttcttggcagtaggaatcacctttctcacttaaaagcagagaacaagcctaatatattctattattctattctctcttctatccaaccaccagtcataatgtgataataattttcagttttagttgttgccctttctacttacttttgtgccataatgatgccttattaataggctatctcatatctttactaataaaaaagaatgtgaataaaatatattaaatcaaagtttgcttgaaaatttacaggaatttgtctacttgaaatatgtgatttaaaacataaattgcctattttaaaaacttagttaaatgtcactatcaattttatttgtacaataaaatatctcgaccggacgcagtgactcacgcctgtaatcccagcactttgggaggtcgaggcgggcagatcacctgaggttgggagtttgagaccagcctgaccaacatggagaaaccctgtctctacaaaaaatacaaaattagctgggtgtggtggtgtgtgcctgtaatcccagctacttgggaggcttaggcaggagaatcacttgaacccgggaggtggaggttgtagtgagcccagattgcgccattgcactccagcctgggcaacgagcaaaactccgtcttaaaaaaaaaaaagaattatctccagagggctaactgaagtcatcacaagagaaaataacattctgactttggtgtctttagaaggatagcctacatcattacaacattctgattttcttctctataaaagggtctctaaaaaatagtattgcttcgtgattctcaaaattcatagctagagtaaaatagctgaggagaaacatgccagatcataggctttgtagacgctgtgtctcccttctaatttactttatgatatatattaaaggcaagagaaaaaagacttttccttgccttaatttcagattagttaaaatggatattttctttgattattttttcttttggtattgttttcaaagttagcatatattgattagagaaaattcaatataaactgatgatgataagaaaaatatggggtcaggcttggtggctcacacctgtaatcccatcactacgggaggtcaagttgggtggattggttgagcccagtagttcaagaccagcctgaacaatataacgaaatcctgtctctacaatacaaaaattagccaggtgtggtggcatgcacctgtacttccagctatacgggaggctgaggtgggaggatcacctgaaccagggaagttgaagctgcagtctgccgtgattgagccactgttcttcagcctgggcgactaagtgagaccctgtctaaaagaaaagaataaataaatgttgggttttgtcttggcagaaaggaaatcaaaagacaatatgtataagtttaacctgtctgtaggaaaatacctgtcggttaaaaagaaaacaaagcatctaataaaagattggataaaggatgagaataggaaattcacagaaaagaaagaacaaataaccaaaaacaaaaaaaggaaaaaatgcttaacctcattagtgagtgtagaaatagcccatttaagctattagtttgccaaatataaagtacttgtgagaatggagaaaatccaacacacatttatttgtgagaggagtatgagtaacctttgtggaaccaaatctgacaatatctatatttggaaataaaattactagtataggctgggtgcagtggctcagacctataatctcagctgctcaggaggctgaggcagaggattacttgagcccaggagttgaagaccagcctgggcaacatagtgagaacctgcctctttaaaaaaaaaaaaaaaaaaaaaaaaagatactaggaggatatatttaaaagttttcgtggtaagaaaaatagcaaaaacgtaagatttttcaaaagaaatgttgcatactagtatttgcataatgactacatgctaggagggattttaagtgaaaataaagcatgttgaagaataactcatatagttatgaccccatttttctgtttaagataaacttgtggctaggtgctgtggctcatgcctgtaattccagcactttgggaggctatgacggaaggattgcttgaggccaggagttcgagaccagcctaggcaacatagggagacccatctgtacaaaaaaacaaaaattagcaaagtgtgctggtgcgtgactgtggtcccagctactcaagaggccaaagcaggaggactgcttgaacccggtaattcaagagtgtagtgagccgtgactgcgccagtgcactccagcctgagccacagagagataccctgtctaaaaaataaataataaacttgtatatagggttgtgattatttgtatgagccatgatggtgtagaagactatatatcagacacagagtgctgaggcaaggttcacctcaggcaagtagaaatggctagttgggagagagggatattacctttgtttaagtggacacatttgtcattaaaaacaaaaagtaaaagataaaaggcaacagaaattaggaggaagaaaaaaagcccttggaatcccactacttagatgtacagattatatatttacctttgtaaacggaaaaataactatatataattttaaagccttgtaaaaacagtatgtcatagaaatgtttttatgtcagtaaacatacattatcgtattttgatagttgtgtaatagatatatggaaatgctaatattttaggtacttcagaaaccacccagaacacttcagtatttctattgaggtatagttgatgtaaggttaatgtacacataaaatatttgatcacttttaacaggaacatgctctatataaacgataactataatcgtatttatcacccaaaatttttcttatgcctgttttgtaaatccctccctcctgcactactaccctcatcttcatcgccaggcaagcactgatctgttttttgtcactacagattagtttgcattttagaaatcttacgtaaatgaaagcataaactgttttttgtctggcttctttctgagatagggtctcactctgttacctaggttggaatgcagtggcacgatcacagcccactgcagccttgacctcccaggttcaacacatcctcctgcctcagcctcccaagtagctgggacaacaggcatgcactacaatgtctggctaattttttgctgtttatttgttgttgtttgtagagaccgtttcgccatgttgcccaggctgatctcaaactctgggcttaagcaatccacctgccttggcctcccaaagtgatgggattaaaggcatgaaccaccatgcccagcctgactggcttctttcattcagcatgtttatatatgttgttgagtatgtaaagagctcatttttaaaaattgccgagtatggatttgccacaatttgtctgtttgttaacctattgatagacattttggctgtttccagtttggggctattacaaataaagttgctgtgagcacctatgtacaagtctttgtatggacataagctgtcatttttcttgggtgaatatgtatagatgaaatggcagggttatatataggtgtatattaatttttaagaaattgtaagtcattttccaaagtacatttgccattttatattcccaccagtaatgtctgaaaatttcaggctatcttgtttctgctaaatctcctttgtaccacttctataaatacgttgtgcatacataatgagagtcgattgaatggattctctatttttttcaattgatccggttgtcttttcttgttgctcataccacacggtcgtgataaagaagctttgtaataagtcttaaaatccgagtattaagccctccaacttcattcttctttttcaaagttgttttggccattctaggtcctttgtttttctagattcattttataatcagtttttttctatattttttcctgcaaaaaaaagacagttgaaatttgatttgcattgacactgtagacagaattgacatcttgcaatattgagtcttctgacccatgaacatggtatattttgcttttgttttttgtttttgtttttgtttttttttttgagacagagtctctctctattgctcaggctggagtgcaatggcacgatctcggctcactgcaacctccgcctcccgggttcatgccattctcctgcctcagcctcccgagtagctgggactacaggtgtccaccaccacgcccgggctaattttttgtatttttagtagagatggggtttcaccgtgttagccgggatggtctcgatctcctgacctcgtgatccgcctgcctcggcctcccagaggcattttttaaagtattctttaattctctaaataatggtttggagtttctagtgtataggttttttgtatcttttgtcaaatttatatctttagatgcttgtgtacatggtattttttatttcaatttttgttactagtatatggaaatacaatatataatagatttttatatatcagtttcatgtcctgcaaccttgctaagtatacttcctagtcttgttagctgtttcatagagattcctttggatttttctatatggataatcatcttgtttgaacaaagacaaatttacttcatttccagctggatgcaccctttatttctcttgacttactgcactagctggaaccttcaatacaatgttgaatagaagtggtaaaagtaaacattgtcttgttctgatctcagggagaaatcattcaatcttttaccgttaagtatgatgttaactgtcagtttcttattatctagatgaggaatttcgtttttatttctagattgctgagaaattattttagtcaagaatataaattggattttatcaattgcttttcctacatttgttagtaaatcatatggttttttttgtttattaactgcttatttgaaaatatttgacatttgaatattaaaccaacctgcttccctgggataaaacttggccatcacattttttttctttttctgtattgttcaattttacttgctaaaattttatttagtgttttttttttcgggggcggagggtttgtatttaaatttataagggatgttcgcctgtagttttctggtgattgtcatgtttaggtatctgggtaacgacgcagacctcaaatgatgagttagtgagttttctccttcaatattctgggaaagttggtgtaaaattgatattgtttcttcctcaagtatttgcaaagaatccaaacagtctctaacagataaaaaagacaaggaaatagattcttccacagagcctccagaggagtcacagacctgatgatatcttcttgctttttggcccagtgacaccatgaaaacaatatgacccatgatgaggagaaaacaaatcgattgaaactcacaactgacatgcttagaattagcagacaaaatcattagagggttattagatacggttgctataactgtatttcacatattcaaaaagtagagataaggaatcgacataactggaaaacacagaattggtagaaccagtaaacagaaaactagtaaggacctaggagctggaataggatagtcagccaacttgatttaattgactaaacattcaaacagtagatacacattcttttcaaatacaaattgaagatttaccaagatagaccatattgtggttccagaaacgaggcttaataactttaaaaggattcaagttggaaatcagtgagaaaaatatctctggaaaatcccccatatgtttagaaactaacacacttttaaataacgcagaggtcaaagaagaaatcagaaattataaaatattttgaaccgaatgaaaatgaaaacccacccattttctattttctattgctgttgtaatcaccacaaacataatggcttaaacaatacacattaattatcttacagttttggatgtcagaagtccaaaatgggtttcatttgggccaaaaatcaaggtgtcatcaggtctgtgactcctctggaggctctgtggaagagtctattcctttgtcttttttatctgttagagactgcttacattctttggctgtgtccccttcctccatcttcaaagccagcaacacagcatcttcaaatctctctgtgtttctcctacctccctcttttgcttgtaatgagcctttcgattacattggatccactgggttaatctaggataatagtctcctcatcacaagatcctttattatcacatttgtaaagtcagttttgccaggtagggctacgtattcacaaggttaaaagcattaagacattggcatctttggtgtggtccattattctgcctaccacactgctaaagcagtacatagatggaaatttacatcactaaccgcaactgttagaaaagaaaaaaaaaaaggcagggcgtggtggctcatgcctgtaatcccagcactttgggaggccgaggcgggcagatcacgaggtcaggagatcgagaccatcctggctaacacggtgaaaccccgtctctactaaaaatacaaaaaaaattatccaggcgtggcggcatgcgcctgtagtcccagctgctgaggaggctgaagcaggagaatggcgtgaacccgggaggcggagcttgcagtgagccgagatcgcaccactgcactccaggctgggtgacagagcaagactccgtctcaaaaaaaaaaaaaaaaaaaaaaaattctaataattgacctcaactttcatcttaagaaattattaaaagaagaacaaacacagaaaaagtagaagaaaggaaataatacagataggaaacaaatgtaacaaataacaagaaaacagggaaaaaatttataaaaccaaaaggtggttattgaggatataaataaaattactaaacctggatttgacttttactttgatatttaacatgaaagctagaagtaaaacaatttaaattgtgttatagatatctggcttcgttgtttttagagacaggttcttgctctgtcacacagggtggggtacagtaatacgatcatataaccatcaacccttgggctcaagcaatcctcctgcctcagcctcctaagcagctaggactaaagacacatgccaccacacccagctaattaaaaaaattttttttgtagagatggtgtctcactatgttgctcaggctagtcttggaactcctggcctcaagcaattcactcaccttgtcctccccaagtgaaatggctgtttttgatagaatttaagtctagtttcctcattttattatactgttttgtttctagtgctaggacctcaccaaactaactcatgtaattcaagctctttgtgaagtagtgatagagcagaaagattttgtcataccatgggaagcctaattaccaagtcaacatacatttcaaataacgacctctgagaagatgcggaaaaacactagacctaactctcaagtgtttcttttggttgccatctctcagtggcccatcattcttacatatttcatcgccattgttattcttttcaggtcattacatcttcattgtaaaatttatcctctcacctgggtttcttctttgtgccaccttagtttcttagataaatcatcatattttcctagattcccatgaagatctgtgaaaggaaaagaggtggtgatttgggacagaataggattcacagcctataggaactctagagggacaaagttcttgcatattatctaatcagaatgatttagtgccaacttgtagatctcaaaacttggaaaaaagtaaaaattgtcaaaatatatcaagaatggatgagaagggattaaaaccaggtgataaggatgggaactctcactgaaagttccattattagaacattctactttgtttatgcacaactctgtggcaatgcaccggggctgttccctgagcattagtgaagtgtctatacttggaaagtcttcgcagtctcagttttgtgtcacttcaatctaagagacccagactctggacacattaatttcaaaccttggaactagggagtttatgttgtattccaaaagcatgtggagctacaagggagacttttttgtaattcagagtctcttacttagccgttatgtggccacaagatcttcagctaatctgcacaattcaggcgcttcaggccaacccagaaaattatctccacaaatgtagaaaataaaacagctttattaattttttaaaaattttatcttgagaccaagtctcactctttcacccaggctaaagtgcagtggtgtgatcacagctcactgcagcctcaatgtcccaggcttgggcaatcttcttgcctcagcctcctgagtagcttggaccacaggtgcatgacactatacctggctaattttttaattattctgtagagatggggtctccctgtgttgcccaggctggtcttgaactcctaggctcaagcagtgctccaatcttgacctcatggtggcatgagccaccatacctggccttatttttttagagacagagcctcactctgtcatccaggctggagtgcagtatattttatttttattttatttttttaagtgacagagtctagctatctatatttatatttatataaggggtagaggaagtgtttgcaattaaccacaggtgttctttagctaaagatctaagaaaagggagagagaaaggaaataaaaggaaaataaagatctctttattataccaaggaaatagaaaaaatgttaaactcttacaacttacttggatgactacctgattaataaataagttagtaaagagaagcaatattaagtttatctaaaaattgctgtcagatttatattgttgcatagctaatagtaggatactctgggattaaagatttacctgtcttatgtagttagcgcttttacattcttttttttttttttttttttttttttttgaggcagggtctcagtctgttacccaggctagagtacagtggcacggtcatagctccctgcaactccaactcctgggctcaagtgatccacctactttagcctcctgagaagctgggatgacaagcttgtaccccgtgcctggctaattttttaattttttgtagaggtctcacttttttgcctaggctggtcttgaactcctggcctcaagcagtcttccctcctcagcctccaaaagtgttgggattacaggcatgagccactgctctcaacctcttttacattcttttaacctacgtggaatgatgctatttttggtttttcgttttttcgggtataaaatgagtactctctatgaactccgtaagttctccagatcctctggagatcagaatcatacacaaaattgtaatgtgcccagtaaaattaactgttttaagaatgtgttccaatagtatttttataaagagcaatctatcctacaatctataacaagactaaagtggattagtcatacaggataaaacagaatttgaaatagtgaatgaaaatcaactttaaaagttttacttttttatttctcccaatttaaaattatcattacaagcattgaagaacaaagagaaaccacttattgttcaagtatgtagcctgcatattagcgttaaacttttctttgtttccttccagtttttacataaatattttacatgattataaatgaagtgtaggtataattttgtgttttttacccttttctgttttttaaccttaacctactctctaaaaatcccatttagtctcattagcctgaatccaaatccttgctactagaagtggctcataaaaatctgtgctgtgatttgcctgttgacagtagatgtgaaacttgaccagtttaattttatccttatgtggattttctaaagataatcaagaaggtttttgttttgttttgtttttgtttttgtttttttgagtcggagtctcacactgtcgcccaggctgagtgcagtggcataatcttggctcactgcaacctccacctcccaggttcaagtgattctcctacctcagcctcctgagtagctgggattacgggggcctgccaccacgcctggctaatttttgtatttttagtagagatgggatttcactatgttggccaggctggtcttgaactcctgaccttgtgatctgcccaccttggcatcccaaagtgctgggattccaggcgggagccaccatgcccagccaagaaggtttttttagttcctatttacttttgaataaaatgtcttaatttttagaatcatgtacatttagctcttttatagttcttcactgcctattcatctttttagaatcttttttaattttaattgtctccctattaattgattgctttcaaattatcctgctacgtagcactaattacgagcttttaaccacttaatcaaaatttagcagattgggtcaagtgtggcagtggctcactcctgtaatcccagcactttgggaggccaagtcaggaggatcacttgagcccaggagtttcagactagcctggacaacatggtaagagaccatttctacaaaacattaaaaaaattagccgggcatggttgcgggtacctgtggtcccagctactggggaggctgaggtgggagaatcacttgggcccaggagtctggggctacagtgagccaagttcatgccactgtactccagcctgggcaacaaaggaagaccatgtctccaaaaaaaaaaaaaaaaaaaattagcagattgactatataagaattttaacagagttaatttgttgttaggacagtcccaaagaccaaaactataaagcttaaattcttgtttgaagttttgtgggggaaaaaaacaaaaacaaacaaacaaaaaaaacagtataaaactaaataggtgatgtgcctataattatgctttttaaatctcggaaataaaataacccaaaatgtttacaatgtctcaaaagataacacataggtgttttttttaactttatatctgtctatactttataagtgctcttcaatgggtgtatctttttatgattagaataaataaataatctagataaagggagattatgccagtgatagcagtaacgtttgtcattcttgtacttactgtgtaacatttctgagtcaggattttagactaaaaaccatgacttaactattagcagtttctttaagagctgatatttctgcaaagaaaaagagagtgcatgttctagatcatgtgtctacacagaatagttcctcaggatgcattatatccctgtctcttaactactcttgactctgctatccctttaagacgtacaacaattttacataaaagtttttctccatattctttttttttttttgaaatggagtcttgctcgatcgcccaggctggagtgcagtggcgtgatctctgctcactacaacctccatctcccaggttcaagcgattctcctgcctcagcctcccgagtagctgggattacaggcacatgccaccatgcctggctaatttttgtatttttagtagaggcacggtttcaccatgtgttggccaggctggtctcgaactcttgacctcaagtgatctgcctgccttggcctcccaaagtgctgggaatacagacgtgagccactgcgcccagcctccatattctaactacctcagacttcagggaaaactatttttaaaaacacatgtgggttttataaaaaccggtaagtttatgaaacttttacattagccctagccctcagtctccaagtccagtgtttatctcttaggttgtatagggatagttgttaggtcttaatttgcaggagtaacaatttgaatccagttaagcccacataaaaagtaaatgaaaaactaagagactcttccatttatggggatgacttgtattacatcctacagataccagaaaaatgttactgtaaggtgcgctctttttgaaatcttaagatgaagtcctttccagttacagaatttttgatgtaacacatcaaaaattgtttccctccaattaactgtaggaacagtaaactgtagcacagttttaaaacttacatagagagaagacagagaatctccctaaagcccaatgattaaacatgtctgttaatttgtccattagacgttttacaaaacagctctgaagaaaaacattttgttccaatagcataaaaatttgcaaaaatcaacctactcatctgacaaagggctaatatccagaatctacaatgaactcaaacaaatttacaagaaaaaaacaaccccatcaaaaagtgggcaaaggatatgaacagacacttctcaaaagaagacatttatgcagccaaaaaacacatgaaaaaatgctcatcatcactggccatcagagaaatgcaaatcaaaaccacaatgagatactatctcacaccagttagaatggcgatcattaaaaagtcaggaaacaacaggtgctggagaggatgtggagaaataggaacacttttacactgttggtgggactgtaaactagttcaaccattggggaagtcagtgtggcgattcctcagggatctagaactggaaataccatttgacccagccatcccattactgggtatatacccaaaggattataaatcatgctgctataaagacacatgcacatgtatgtttatagcagcactattcacaatagcaaagacttggaaccaacctaaatgtccaacaatgatagactggattaagaaaatgtggcacatatacaccatggaatactatgcagccataaaaaatgatgagttcatgtcctttgtagggacatggatgaaactggaaaccatcattctcagcaaaatatcgcaaggacaaagaaaaccaaacaccacatgttctcactcataggtgggaattgaacagtgagaacatatggacacaggaaggggaacatcacacaccggggactgttgtggggttgggggaggggggagggatagcattaggagatatacctaatgctaaatgacgagttaatgggtgcagcacaccaacatggcacatgtatacatatgtagcaaacctgcaggttgtgcacatgtaccctaaaacttaaagtataataataataaaatttaaaaaaaaatttgcaaaaatctggaaatcagcattacctttttgtatttttgtttttattcatattttaatgtagttgaaattaaatgtgtctgtaagagtttagttcttaggtgggggagtccaggtaattatgaatcctatgcagagactgtcgcttgtcctgtcatgctttaatacaagacaaggaggaaacaatctatgtctttgccttgggaagtttaataatactgcctttgcctagaactgctattatttgttcagtcaacaaattcgagtgccctccctgtgcaatgaactagaaagtaaagaacaaatctaagacagtatcttaaatttaattcccccattctagtttaatcagtgttaattatcatgaaaatctgtgtcactctctgtcttccctctccctttttcttcctgactgcttcccttctactcccttttctcccccttcattcctcagcacacccaaattttactgcacctttctatcagtaattgtaggagaagggatatatgccccaacctcactgggcattaggggtgtgtgtgtgtttgtgtgtgtgtgtgtgtgtgtatccagttttttttaaggactaagtgtctcctaaagaagtctgtgctctttctgtccctctttttctgaattattgttttaaatcaagactttaaatagccacttaaacaagatgagtaacaattctcactggctcagtagctgttttttttccaagtatgttaaatatgttatattactgaaggaagaaatattttgtttcatgttttggggttgagtatatttgatatatttgtggaaagaaaagtttatctttgttttttgttgtttagaggaagttccttttgagcttatatttgagccccaaaaatcctccaaaaaattgttcttcctcttttccatgaatgagatttagagctaaattcatacaaatgcaaaacaaaataaaattacagattctctgaactctataactcctaaaaagattcagctatggaagcagagttgaaaatcacaagaattttggaggaaatgcattaaacagactggttatatcaaatcagaagatccacaaaaaatgcaaagagacaactgctgaatatatgtattcagtagaagcctgtgagacaatagcaaatttaaacccacccatggtttccatcctttgaaaaaatttaccttgagtaggacacaaaggaagaatgtcagctggtctattagtgtttccttaatggttcctgaggggaagaaaaaagaataattggtgtgagatgtgtataacaaagaagacatgcagagtattttttaagatggtacagtaattttgaggaaaaaaattaatattaaacgtctcctttttcttgttcccccaaaaagtgtgtgttccaccaaaaagtgtgtgtgcacgttctactgtcataccaaaaaagatgagactgtcccagagtctcagtgaattatcttatatttctgtagggaatcagattagatgataccctttagctttgtgtttatttgcttttggtaatgttccctattaagtggcctttctttaactcttctccttgttcatccttctatagtacctcactcttgtctattgattcataagttgccctctgtagaagcagtttaatatcatcagcttactatctgatggttaaaatgtctttcacttatacacccatgattctgtggaatttgtaagccagatgaattttttaaagccctttgtaaacttaatcctttaatctagaaatctgaaacaatggaataattcagtaaaaattatctattttcttagttttcactctatcaatatgaaaggctaggcaaacagtcctgatctgagatgaaaacagaatgtttcagaaatgctgcctatctaatgaaaccttaattgaagtatccttttgttgtctagaaaacttaaaaataacagaatcctgagcgtattattttttattgcttgaagtaactttagatatctagtctcactcttatactttatagctgagtaatgtaggggcctgagacctgtgacttgcttaagttcacatagttgatgaatagaagtagacccaggtctagaactgaatcacaagtcagttttcttatgtatgtactcatcacatgttgaattacatgctgggatatttctaaccatgaaatgggaagaacgcaggccactggttagaaagctacgagtttgtacccacaacacttgatgttgcaatctctgggctactacacaattgttcacttgatcagccaactatttgtttggtataggtaaagttctcttttatcctgcttaatttgaatataggtatcacttagacctaatatttctcagaatgactttgcagtggcaagtaatgggcctgatcttgtatttcagctcaaatagctataactgtaccaaagacatggaagaaaccaaaagatcggacccgaaccactgaagagatgttagaggcagaattggaggtaagcaaatctcttaagttcatattcagagcagtggtgccatttcatagacaggtatgtgtttatacctatttattgaaatagttttccaagcaaaacttaatatatcaagctcagagactaattgttttaagtccattttatattagaattttaaaaagatttttagtaacatgtttgatttcattgaatacttatttttctttcaaaatacctcttttaaaataacaaacttggccaggcacagtggctaacaactgtaatcccagcactttgtgaggtgaaggcaggatgatcactgcaacccaggagtttgagaccacctgggcaacataaggagaccctgactgtacaaaaatgttttaaaatactagccacacatggtggcgcatacctgtggtcccagctactcgggaggctcaggtgggaggattgcttgagccctggaggtggaggctgcagtgagatgtgatcatgccactgcactccagcctgggcaacacagtgaaacattatctcaaataaataaataaaatgacaatttttggttaaccttcctcttcccccaactagaacttttgtttgtattaactggatagaaagataatctggtaaacaaaaatggagagtttttaaaaataccattagtaatggtggtagaattcatctagtacattataaaggaattgattttgaatctgtcatctgttaactgcatcccagaaacataacttttcttcatatggttgtctgtcttaaaataagccatgcgagattttgcttcagattaaaacataccaagtccaagagatgaatgtgaggaagaaaaaggacaaatcagtcctaaggattactctaacaatttccttgtctgtaatctcaacatccttagcattatgtattgaagcttataaatgaagagcaatgtaaatctgtatgtagctttttccctttttttgactattcttttagctactttattaaaataattttactcaaggtttaacatgataaaattaaaattttactcaaggtttaacatgataaaatataaaaattatcttaagataactttgagtgtgtttacttcattcggcttttttagcaagttataattcttaccttctttgggtatctaacagtaccccttggttacctcccctgtgccttcattgctgttacatgatgctgtgttgatgtcactgttagtcccatagcaaccactaaaatgttgatcgttgtgatttcattgtggttattagggtgtaaaacttggcagtaaggtatagaggtgcaaatagtcattgcactccttttgcagctgaacctgaaaatgttcctcctacagagaataaaataccttccagaggcatgggaatcacatacattcctgctgtggctgttaagagcttcattaacttctttctttttagattcagctggtttttttgttatttttcttctgttatacttcatgttggatttctaagcattattgaatattatataggccactcctccattgccttcaaatattcatcctaatcttcagcttgaggttcagcaaactttttgtgtaaaggtccagatagtaaatattttaggctgtcacaattcctcaaatttgccgctgtagcttaaaagcagccatcaacaatgtgtaaatgaaagaagcaaggttgtatcttcacaaaactttattggtggacattgaaatgtgaatttgtatgccaggaaatatttttccagattttttcagatattacaaatataaatatcatccttaccttgtatgctgtgcaaaagcaggcggtgagccagaattggccctcgggccagagtttgctataaagcttctttagcttgttactcttgaaacacaagaactgttttgacttattttgaaccaatcactttttcttaactttatagtttaagacaaggctgggcgcagtggctcatgcctataattctagcactttggtaggctgaggcaggaggatcacttgaggccaggatttcgagaccagcctggccaacatgacgaaaccccatctctgttaaaaatacaaaaagtagctggccgtggtggcgcgcgcctataatcccagctactcaggaagctgagacaggagaatcacttgaacccagaaggcggaggttgcaatgagccaagattgtgccagtgcactccagcctggacaacagaacgagactctgtctcaaaaaaataaaataacctaaaaaatttttaaaaactaaagcaagacaaaaaatatttgctttttacatagtgacttctttcagaaatccttttttctgtctttcctaaaactgagcttttgttggcatagtgtagtaaatactggatgccattgtcttcatttccactaatcaggctccccctttcttagatttattttgtcagcttttaaaataatttgtttctggtatcagcttatttgggttacatattaggttgttgcattattaaagatatttatcaaaattatagtctagaggctgggcatggtggcttacgcctgtaatcacagcactttgggaggccaagaagggcagatcacgaggccagaagtttgagaccagcctgaccaacatggtgaaaccctgtctctactaaaaatacaaaaattagccaggcgtagtagtgtgcgcctgtaatcccagctactcaggaggctgaggcaggagaatcgcttgaacctgggaggcggagattgcagtgagccgagatcgcgccactgactccagcctgggtgacagagcaagactccgtctcaaaaaaaaaaaaaaaattatagcctagaaaagtaaggatgaaggatgatttcatattaaaattgcttggcaaagtatcttaaaataagttttaaaattttagagcatttcatcaattattatatacatagttgccagtctgattttctagcacttttaaaaaacattgcattaagcacagagttctgtcaagtgaattcttaacagattcctataaaaggtttacctttggctgtccagccaatgaagtcatctctttcttaaatctgtttctgcataaacaatttaggaactgtacagactagttgactaggattttatcctgctttaaaaaaaacccataaatatttaattaagctatttttgttattctcttcaaatacccctcatagtaatacacctcagataattcagtgattctgtgttctctgaattatggtttgttattcatagaactagtttctttatacttctttttccagttagaaattaaatttctaagtaatacagcctctgtttatatatgatagactgttgttgattgtaggtacagagaagaggatgcactgtattctctaaaaaaaagtttcacattttataagatctgaaataagaattctgtataattgtataatttggttatgttgctctttaataagtttaaataccatttacatactgatatctcagattattaaatgtcttcttgatgacctgtacttaattatgagatggtattataagattattataattagactatagtagagtctaaaatttttaaaaatgaggctgctgattcatgattcaaatttggtagatctggttttttcaatgtttaaatgatacctactttctgccatgctttataaaataaattgtttccaaacttatttttttggaatattatgtctgtctgtcttttgagggtttttatatactatctttttccatgaattagtcgggggaataggtgtggggtggtgtttgtgcatatttgcatgaactttttatttccattattagaaacagagtctaaaaaccatctgtttctgttgataacattaaacaatttattggcttttcaaccatgatctgttatatggtaaaagaaaatttactagtattatatctgttttaatactatctaacaaagaagtatttgtcactcaaaaattgttttaaacataatttcatagattatttggggtgaacttttttctgctatatatgacactactttacactatcctctgctgaaccagctccagtttttggctcttctcctcgtgtgaatttatcaattagaacacctctgagtagttgtttcagaggattgttttcagagtgcatacccatcgtgaaaagagttcacagagaactttgcctcaaggagttttgaagattcatgaggcctttacagagccatttgtgtttgatatctgacactaagatggtcaaaaataatctagggaataacttcaattctttttcgccttctgaaaataggtgtgatactccataacccagatttctcttttttttttctctctctctctttttttttttttatatacaagatttttctatatggtcacagcctcagagaagtctaagaacgaataacaaaatagattttaactagcaagtggcctttttgtaaaatgagatatgatcagttttataggacttagatgttttaagctattctccagactgtcaatttcacagccagaagacagtgtaaaaaataccctccagtgtttctttttatatttgttgagctttaatggcaagggtagtgtagtgcttgttttagattctgactaggactctttcatgttcataaagttccatggattaacagttctttccattctaacctttggtatatttggatattattagtctcatgttaaagcatttcagcagccatttgaatggtcttccttttcctaggtgctgaaatgagaaaagtattttttttaaactcagcattctaataccacatgctgaacacagacattcttaccttgaatgacatgttttcctttgctttttgaagggagtagatgtaggtttttatgtatatttacacccgtggaaaaaaatgtaacctctttgttcatttattatttagcttaaagctgaagaggagctttccattgacaaagtacttgaatctgaacaagataaaatgagccaggggtttcatcctgaaagagacccctctgacctaaaaaaagtgaaagctgtggaagaaaatggagaagaagctgagccagtacgtaatggtgctgagagtgtttctgagggtgaaggaatagatgctaattcaggctccacagatagttctggtgatggggttacatttccatttaaaccaggtaagtttatacctgccttcctatgtacctctttatccctctactgcaaccttagagaaatgttgcctctttttagagagatactggatggaagaaagaggtttatcacaatataatatttacaggacagatcagcaagcccaagttagtgactagcaaatccagagagttctgtattgctggaaatgatacccgacactggtattccccttttactggcattggaagagcatctggcagagggaatcagacagtgccatgctagtgggtgcagtttgattttaaaaattattgcattcgttttaattgaaagggatatagagatattaccacattcctcgagatggcgttagtcatctttcataagacttgatctctgttgacagaaatcactctgtggaactgaattctgaaacaatgtattgagtacctgcagtatgggaagttccctgtggtaaatatgtatgataaacaagtaaataaggaatatatatgataaacatatggtaaacaaatataaaccctggaggatttttttatcttcagataccatcaaatgcattaaacctctgtcataatgctatataaactgtgactgactttgagatatatggagagatttggtatggatctgtaaggaaagatggttcctttgacagaaagtttgggctgggtgcggtggctcacgcctgtaatcccagcacttagggaggccgaggcgggcggatcacctgaggttgggagttcgagactagcctgaccaacatggagaaaccccgtctcgactaaaaatacaaaataagctgggcgtggtggcacatgcctgtaatttcagctacttgggaagctgaggcaggagaatcgcttgaacccggaaggcagaggttgcagtgagccaagattgtaccattgcactccagcctgggcaacaagagcgaaactccatctcaaaaaaagaaagaaagaaagtttggagtaggtgaaaagttttccttagtctgccaaatctagactaagttttgcaggaggtggggtttgagtgtaaaataccagacctcaaaggtaatctagatcaatatttttcaaactgttggatttaatacatttaatagattgtgaaattaataggtcacaaccaacattttaaaaaaggataatataataaaaaatgtcagtctattacatgtaagtaagaataagtattgtttttagaaactttgtagttatatatgtgtttataattgtcccgggtcatgaagtcattatgtcttactgtgagttgtagtcagagatgtttgaaaaccaatgactagtacttaccactttattttatattatttttaaaagtttttatttattgtttattttttacagagggagggtctcactatgttgcccaggctgctttcaaactcttgtgctcaagcagtcctcctgcctcagcctcccaaagtgctcccatgcccagcccttaccactttgatatactgatctttcactaccagtaaaatcctgttaatgggctttatgaaattgtaaatttatgctatcataaaactttttttaaaaaaaccctaggactcagtgtactcaattgcttttgtcaacttaggcttgtatactgtgttcaaaaataaagaaaaagatctaggcttgtaccaggtcacagagtacttgtagccatcaccaatgtgtcttaagaaaatggaaacactattgctatttttagactatgcaaattatatttttatattaatttattttatgttttaatattttgtatattgcataatttatgttacttatattttatattatattttaattcttttcatccatcagttttacagtataggccctgactataattgaccaactaccttttgcccttgtaatatttaacagcagtaattggaaaaaagacaatagtcattggaaaaaaaacagtttgaaatttagatcccaataagctgtctactttttaataaatataatagggtaataaagatatggtggaaaacatttggaatattctcaaagacccatcagcgggtctataacctacacattaggaatctctaatgtaagaaggatccaatctgctatcaggaagtaatctggagtctgattttgatgagttttattaattaaaataagaaaactgtgatttttttttagatgaaattataggcaggagaaaaaacttagtatctaactgcatagacagttcattatcttaaataagttgtttctgtgttttgtgtccttttgcttttttttttttctctaaaataacatttcctagtgaacaaccaaagtagccttttttatgaagccaagggttgtatcaggttccttatttcttagttatttaagttatttagttatttaagtcttatttctaagttatttatttaatgaggattattacatgtccctggccaaaggttacttagtgtgtatgtgaagtgattcctacttgctttagattattttactactcaaaggtatttagaagggatgaaagaacaagtgatggtttaaaatctttacatattttctgactgtatttcattgttcccttctattttttgtttgttcatgaagagataaatactggaatgtggtttgtactcttagggaatgtaggtcatgcatcatttaatgacggtgatttgttctgagaaatgcatcattaggcaatttcttccttgtgcaaacaaaagagtatttgcacaaacctagatgttctagcctactacacacctaggctgtatagtgtagcctactgctcttaggctgcaaacctgtacagcatgttgctatactgaatagtaggcagttgtaacataatggtaagtatttgtgtatctaaatataactaaacatagaaaaggtatagtaaaaatactatataaaagatttaaaatggtacactgtatagggcacttaccatgaatggagactgcaggacttgaagttgttctagatgagtggtgagtgaatgtaaaagcctaggacattactgtgtgctggtgtggattttataaacattagggcacactacatttattttaaaatgtgtactttctctaataatgaattaatcttagcttaccttaatctttttacttgataagctttttaattttttaactttttgacttttataataatatttagcttaaaacacactgtatagctatgcaaaaatatttctttttcctttttctttttctttttctttttttttttttttttgagatagaatctcactctgttacccaggctagagtgcagtggtgcaatcatagctcactgcagcctcagcctcctggactcaagtgatcttcccacctcagccacctgatagctgggactacagttgcatgtcaccatgcccagctaattttttaaaattttttttctagagattaggtcttactacatcgcccaggctggtctcaaactcttggcctcccaaagtactgggattataggtgtgagccaccatccctggccttgtttctttatatccttattctatatgcttttttctatttttaaaattatttatctttttacttgttaaggatttttcttaaaaactaagacacaaacatatattagcctaggcctatacacggtcaagatcatcaacatcactgtcttctacttccagatcttgtctcattggaaggtcttccggggcaataatatgcatagagctgtcactctattataacagtgccttcctctggaataattcctgaaggacttgcttgaggctgttttacagttaactttttttaataaatagaaggaatatactctagtgatttaaaagtatagtacagtagatacataagccagtaacgtagttatttcttgttactatgaaatattatgtgttatacttgattgtatgtgctatacttttaaatgactggcagcacagtaggtttgtttacactaccattaacacatacatgtgaataatgcattgtgctgccacatgaggatagttacagtgtcattaggcaataggaacctttcagcttcattatagccttatgggctataatgttgtatatgcagttgtatatgcagtttgttattgatcgaaacatcgttatgcaatgcatgactgtatataatgccctacaaacagtgtctgcctatattcctctttctagaatcctggaagcctactgatactgaaggtaagaagcagtatgacagggagtttctgctggacttccagttcatgcctgcctgtatacaaaaaccagagggcctgcctcctatcagtgatgtggttcttgacaaggtaagctgcgtactcagagaaaactagttctttttggtgggaactgattttaactataagagcaaatatgtgaagtatgagcagtttttagtaattgttagaccaaatgatgtaaaaatatctaatgtttaagaatttgtttccctaaacactgttggattttgagtttcttataggttacagtcattttgggatttggcccatgttggagtggtggttttttttaatgtttattgatttatctgcttattatggctgttttttggtgaaataaaaaattttgtgtttgttgggggaaacatggctaaattgatacggaggtctttcctcattgttctaaaagttcattatggaattctattggcattgaagacaggtcagaaatctaggaaggtatttggcagatcaaacataagtgagagtcaacatgattcaaataatatgtatctcaaagtttccctaatagatacctccagtgattgaattctccaatcttgtgcaaataggcatccttcctctttgcatctgatctttatggtgcacacagcaaattagtacagtcagtatttgtttactaaattaaaaggagtaaagtcagatctactaaagtaatttcatcagagctgatgattaagcttgaagtatttttgttttgtagaggaacagaaatgtaaaagtagagattaactatcttatggaatcatatctacctcttaaccgatttatgcctagtgtttcattattggaatgctaagtttgtgagagttatttatatcctactgctcaaggtcataaccaaggtctgaattttcacgcaaaaaaatttgcagcctccggcataaatgggttagtaaagatgtccagcagctgcttatccagaactcatttatactattttactttcttatagcaacaggtcttcttacttctattggtggtatctaagtcttctctcctagatacttatgtgaggacagctgaatgactgattaatggtgctaatttgaggctacttcagtacctcagaagtcaagtgttatatccaccaaattcaattatcctcttagaaaatattcctgcctgtcctgctgccttatctgtttatgactttggccactaattagttgatttctcactgatctgcttaactttatgttgtccatggtcacattacatgcttattcaaagtcagatatctcagattaacaaggcagacagtgaaattttaaatgaatcatcacctatgaaacatgtctcctctaagacttattgtccactcatagtacattctttactaaccataagtctacagcatcaaaactaaaatgagcagtagcaggattcgtataggcaagtgctctatatcctggtgaatatttttttttaattctaaaatttgaccctagtatagaggatctcaaaatatcttgtcttgtgccattcagttggtcctcagtatctagtgagccagtctgctgattatgtatagcccctacttggaaatttaaggcctaaatcattcccagcgtatcagaaaaccattgttttagcctaatggctctaagagtagcccaggagaagctgccatggatgagattggacttctgcgggttccaaagctggtgcttaccgtttcagctgatgtaacttttcagtaaaaatttttgttatcttttgtggcagggaatgctctggaacatgtattaagctttcttttgctttttcatgcagatcaaccaacccaaattgccaatgcgaactctggatcctcgaattttgcctcgaggaccagactttacaccagcctttgctgattttggaaggcagacacctggtggaagaggcgtacctgtaagtgcaagttccctacaactcacttagttagacactggcacagactccatgaaatcctacctcatggcaagacagcagcttttattcgttgattctagtcaagaagaagaagaagaggcaaagactatcctttccatactcatattaaagcagataaagaatacacttgagttctttttacttggcagaagctagtctgcattaatttggtcttgattttttttttccctattttttcaattgaggtgacctgcaaataggtttaaaaatagtgccaaccatggccagggatggtggctcaggtctgtaatgctagcactttgtggggtcaaggcaggaggatcacttgaggtcaggagttcaaggtcagcctgacaacaaagagagaccctgtctctaccacaaaaaaaaaaaaaaaaagaaaagaaaaaaataggccaggcatgctggcgcatgcttatagtcctagtcccagctactcgggagactgaggtgagagaattacttgaccccaggaggtccaggctacagtgagccatgatcatgccactgcactccagtctgggtgacaaaacaagaacaggaagtccaggcttcagtgagccatgatcatgccactgcactccagtctgggcgacaaagcaagaccctgtctctgaaaaaatatatatacagagcgagccaaccttgataagattcctgttttgttttgaggtgtcctaaaatactggagatctctgatgacattcagctaatgatcatgtctttgtctttgtttctacagatttgcaaagtgcagagcaggcatggattgccaattctggaacagagcaaagccccaacttgccctccactggtgatgtcacacccacccatgaagagcctgcctctaggggtgcgctgaacactttgttttttgtaataatagtctctggtgttataatattttctgttacgctctttttatttactattgattgttaagtcaaaattttaacaaatgacatgtacaaaagagtgcagtattggtaaactgcagattgccattacacccccagtggcaggctctttcagcggtggaagtggcatcaccagtggagttatgctggggcactgcactgtgcaggattcggcaggctctgcctactccatgctttgtagacttgcagaaagcatggggaaagttgccaatgatgttgaatgtctcttttccccaagttagaatggcatagagagcaataaatctaacattttggaggagcttggggtttgatgtacatttgcagataaccgtgttacttcattttatgtaaggtgacactttttgtttccgcatcacctttttatttctgaaatggcaacttttgaaacctgctttgaaataagactacattgtctgaaaacaaatgtcactttgtagatatttaaattatttgattattttcctgcaaccgaacagtgatggcgtatacttgaatgcctacagtgtgttggaggctttgtaaaactaccgaaaaccacctgaatttgaagcatactgtttattgagccattaatccatcaccattttagagacctgtgtatgtgagatactctgtttctcacacatttatctattttcaggaaatactaaattaaaatttttctaaatcttgagttacctcaccagaaagtcttagaaagcagctttctagaaaccattttatacccttttttttttttttgagacagagtgtcgctctgtcgcccaggctggagcgcagtggcgtgatctccactcactgcaagccctgccacctcctaggttcacgccattctcctgccttggcctcccgagtagctgggactataggtgcctgccaccacgcccagctaatttttttttttttttttttttgtatttttagtagagacggggtttcaccgtgttagccaggatggtcttgatctcctgacctcgtgatccacccgcctcggcctcccaaagtgctgggatgacaggcgtgagccactgtgcccggcccattttataccttttttttcagtattatttccctttttaatgttgaaatttttatttgtgttactgttcattttggttttggtttatatctttgttttgccaaatatttgaaataatgttgatgctattttgaatattctgtggataatagcatctgtggttattatcatattgcccaatgttgttgatatgtgactcacaaaatgtataaatcctcttccagtgtcacttttcactaacagcttgctagtcattgtttgctaataactagttataacaaaaaggaaatattgtgagtttagaataagcaatgtctcttttaaattattgaaaatagaaaatgattttcaaaagtaactttatcacagcatataccactcctctgtatacctacgtatgtgagatcagtgagttattctggtacactcaaagtaatgtgactagaagtgagatgttatctagaatttgtagtagctccaaaaagatcaactttaattatttaatttacttttattaagcagctttgttctgtgtcagaagctagtttttaagagaaattttgatgtctcagggtaatgttgatatgttaagccttaacacaagttattcttccagcctatctcctagataacagacattctccacttaatttgcccagcttaccttggtatattgatgtagatacagatgggaatgtcataggacataaatatcaacatataaaggaacaaaaatggccaggcacagtgactcatgcctgtaatcccagcactttgggaggccaaagcgggtggattgctagagtcccggagttcaagaccagcctgggcaacatggtaaaatcctgtccctacaaaaaatacaaaaatttgccgggcatgagggcacacacctgtagtgccatctacttgagagactgaggtgggaggattgcctgagcctgggaaacagaggttggagacagaggctgcagtgagccaagattgtaccactgcactccagcctgggcaacagagtgaggctctgtctcaaaaaaacaggacagaaataatgctgtttggaaaaaagcaacagccctactctttgcagtttctgattccatacttcaaataactttttccagttctccaaattatcttataattaattatcacttaatgatattaaaatctatgaggtatgccccattattatcttaagtagccatgacttctaatataaacttttctacagctcatgcctgtaatcccagcactttgggaggctgaggtgggcagattacatgaggccaggagttcgagcccagcctggccaacatggcaaaaccgtgtgtctactaaaaatgtgaaaattagccaggcgtggtggtacatgtctgtaatcccagctactcagaagactgaggcacaagaatcgcttgaacccgggaggcggaggctgtagtgagccaagatcacgccactgcactccagcctgggtgacaaagcaagactctgtctaaaaaaaaaaacaaaaaaccaaaaactttgctgtaacagacttgctataaaatatttttaatgtatgccaatgattttaaaatgtcatatgcagctacgtagttttcaaacctaagtgtccttcactggatagtaaagtgcatatctgttggaaattaccatgaaatatcatgtctttagttatttttaaaataaaattatgggccgggcgtggtggttcacgcctgtaattccagcactttgggaggccgaggcaggtggatcgcaaggccaggagatcaagaccatcctggctaacacggtgaaaccccgtctccactaaaaatacaaaaaattagccgggtgtggtggcgggcgcctgtagtcccagctactcgggaggctgaggcaggagaatggtgtaagcccgggagcttatagtgagccgagatcgtgccactgcactccatcctgggcgaaagagcaagactccgtctcaaaaaataaaaaaaataaataaaattacttatcagttgtgttagtagtctttttgcggacatcacagaaagcactccaaaaaatatatcttaagaggagcattggacctatataagtaatttgccatttatacttattttaactaacttttgagataaactgatcaatcataaaaatcctagcagcaaagaagaatcctaggagtaaagtctttctttaaaggaacacttggttgtcttccttctttaaaaatttaggtgtatattgattctcttttctttggttatccaagtaggcagtggaatttaagattacagtctctgaataagataggaatgatgtatattaaattgcaaaacggagatgggtataatttcataatacatttttgaaaactgacagtgggtaaaaaatgcaaactttaacgtcacctgaaaaaagaaaatggctcactaatcaaccccagactttgagatttttagttttgacattgtggaccttgagcacattataccttaaagttccttaaagtactgtctttcaaagaaagaaaccaggtgtcgtttctttttgtgtagcccatacctcttagcacaggatcctagattttttgtgtgtttagtatataaatcattcatcatatgttgctacttctgaaggataccataaatttgattatctgtattaagattttcacacacaaaaagggacatgaaatgtttaaatttatgtatcagttttttaaaagttccttttgatcctttggtgttgatgataatatagtttttagggtccttttacatggtttatatcctataatcacaataatgttttcaggtagggctggcattgtatatatgagaaaacaacaaaactaagagacttgcctatagtaactttgctcatatatagcagatttggactctagattctgattcttttgtctcctaagttcactacaccacagttttccaggcattgctattccaaacagtgaattcattctcagagtgtaaatatgggcacattagagattgattaattgaacatattaagaatttgtaagtatagtagatctattaatagctagataaatatttgagaacagtgtctttatcttagttataaccagagatacaattataatttaaaattttttcttgggtgctttcacgtgggttataattttaactattttatcctggactaacaatttatcagttagcttttcaaagttttttttcctttgaagcattattgttactttctcacatctctctgttgctcatttgaaactcacacatatttgtcttgggtcaggtaaagaggtgtggaataaatcatattgccattttccagattcaaatctcaaggcatatttattcattggtgtttgcagtaggttttggtaatgggcattttctgactttgtctcctaatgtgcatctatggctcttaattggttttgacataatttcctttcattgcatccagaaacatttgttcttgacaatgtttatgtacaaatgcatggattaaattaaatatcttgtgatataattgtttacctgaggtttagccaaccatttagtaagttattaatccatataagtcaacactagaatataacttgaattataaaaatcaggcattacttgattaccacatttttctatcagaattgtttcttctgggctactatattaaagtttcagttacaatttatgttcttatagtagtactgtctggtttaacaactgttccctgttggtatttttccaatctgatgatctttatttcctttcagttataccatgtgtctcatacctctgggtttatctgacctgtttgtttttttttttaatgtttatcaaataatctgtgatatcatcagtactgtatccttagctggatgcatttgacaagattggtgtgaaattttgcagaaaccctaacttttgatcctgatgcattcttgatactaccatttctaattggggcagatggtgaagcataaaggaataattctgagaatgattgatgtgtaaaggtgtttgagcttatcagcttaggccccagactgtgttatcgcctagaaactgtctttttatgtaatgaatgacattaaagtctagacttttttctctgaagcgttaaatgaattcaaaagggcagcattggggccttaagtgagaaatgattctcatctatgtgtgctttgtatgaagtttttattctctcttgaaatctaatggctagcccttcagtgcaactcagaaagaaaaaaaaaaaaatctggtggcagtatttgcccagcactaacagaatgatatatcagaaaaagtaaaggttgtcaacatgcagcaggtctgcttgaaggtagcagagcttagtatcaacccaaatatttaaccttgaaaaattatttccaagcatttaagatagtaattatgaatattttgatacacaaaatgcaacttttaacttactctgttatctctacttagtgtgctggcagtataacatggcaacatacattggttttaacataagggtatagtgggaatccagcaggaacagagcagacaaataaaaggaagccttttttttcagggagtaatttagtttgactctcattgatgatatataacgggcttattttagtatttctgacccagcataatgagtggaatcttttatgatctacagtaaggcttagtgatgatattaaatttgcattttaccctgggattgtagaaacccagttttagcagatttgtaactatgatgatacctacctgtgaatttttgtaattattgaagtgaccagtccacagttattcaactaataaaagataagcttaaattaggactagtctttctcattagaagtaacggctttgtcaaacatctggttcaaaaaggcctcttgttcaaaagttgtagtggtggagaacattacattgatggtattctgaagttattttttttacccccaaaaaagattacctccagtttgagtacctagtacccaatctttgcatctagcattgcttggcgtagtcatcagacttgacttgaacagcacaacaaagccaataaattgtaagtactctgaatagctgtaatattcttgtcctagttgttgaatgttgggtcacgaagatctcaacctggccaaagaagagaacccagaaagatcatcacagtttctgtaaaagaagatgtacacctgaaaaaggcagaaaatgcctggaagccaagccaaaaacgagacagccaagccgatgatcccgaaaacattaaaacccaggtgagaacaaaagcatatcctaacattcttttgaaattatattgattttgttttaacttattttgctttgctaatgtttctagagataatcagtttaagactttttataacattttcctattaaaagaattattctaaaagccattatggatgccaggcaacctactgttttctcttgaaattgctttatgtgtattttttcagaatagttaccaggtctagagggttcatgtgtcatagacttatgtaattcaggcttaagttaatatttgcttttctttaaaatacatttttagattctcagtgattgagtctctttatcctatttatcctaattattacattgctttatgttccttgtcaggccttcattgccaataagctagaatttagaaactcatcttgttttgaagccttttggaataaaatttaattctttgaatctttttatgcatatcctgccctcagaactatgaggataaattgaatggatttattttattgacacaaaattaatttttatgtatcagattatataaagcctttatttatcttttgctttatacacaatgtcaattcctatccccaagttacctctgcgacttgagatgtttttgcttctaggcaccaaaactggagtctcttaaaattcacacttgtaccagagccaggcatcacagatcacatactaacttttcagcatctggattccttatatatcttttctctcaccatgaacagttaagtgtagcagttcaaagttccagctctggaggcagagtcctgactctgttaggcaggttcttaatctcaactataaaatgaagttacaaacattgagtgcctcatagggccagtgttaagattaaatgaaataaatataaaccatttggcatggttcctggagcgtggttaagtgctcagtacgatgatgtccctgagatcagagatgtgccttagatatctttttgattcagtaccatcacataacctcagagagcaggggatccccaacccctagtaccagtcagtggcctgttgggaacggggccacacagcaggaggtaagtggtggcaaaagagcattaccacctgagctccgcctcctgtcagatcagtggcagccccagattctcataggagtggaaccctattgtgaactgtacatggaagcgatctaggttgcacgctccttatgagaatctaactaatacctgatgatctgaggtggaacaattttatcctaaaaaccactttcctcttccccgctcaaccccacccccaaccctggtctgtggaaaaattatcttccacaaaaccagttcctagtgccaaaaggttgaggaccactgttagagagagtaaattctcagtaaataattgttcagtaaataagcgaacccacagagtagttaatacaaaacaaagatgaagatgaggcaatccaacaactagccatgctgtcaaactgtacttggcggtttgcttttgtttatctctttagtgattatccccaaacatttgccacagggttcctaaggacatccttcatcacattgctgagataattctctccatttcaacatatctcaaccttttttggaaaaaagaaaaaaaagtcttttttgtccttctctccaatctccgtgagaaatgcttaatgataatgggcctaaatggcttataaagatagttaaaacttcctactggatcttcatcattgacagtgaagatgtatttaaggcacttggattaatgctttactttattaaattcttactgtacctataatgaggaaatagatgttatccttttttttcatgaggaaactgaagcttcaaaagttgtcaagcgtcatgaaagatactaaatagtccagttgttataactcgtaatctgtttctgtttataacagagtcctctccgttattgtcttatttcagaaacagaataattatcttgatatgaggcagcattaattaataggttttctttagtaagtagataaaacaaatctaatggagaatttttaaaattcctttacagagccagtacaaccttcttttttcttgacactttcttttaaatatggacttgctttgttgccttcccttacgttcctactactatattaaatcagcattgtgaacgaccactgttgatgaccttattctcatcttcttgaagcatttttaggatatcattgcctcaggacatgtctgggcttctacccctaggattccctgcattctctttcttctttctcctctattacaacatttctactgatgctgcctgagtcatctacctgaaacactgatttttgtctttccattcgagctttttaacctagcattcaatatgtcattttcactcacagccagtgaaaactagtcttctgatatttccagcttgttctctcaattagcaagctagaaaatcctcattaacaattccttcctaaagtgttttctccttcataaaatatctactttattttttttcttccctttacctagctctttctgtcctttattatctggcccaattctcatttccttctttttttttttcttttaagatggagtctcgctctcgctctgtcacccagcctggagtgcagtggtgcgatcttggctcactgcagcctccgcctcccaggttcaagtgattcttctgcctcaacctcccaagtagttggtattacaggcgtgtccaccatgcctggctaactttttatatttttagtagagaccaggtttcaccgtgtaagccaggatggtctctatctcctgaactcgtgatctgcccacctcggcctcccaaagtgcggggattacaggcgtgagccaccacccccggccctcatttccttctaaaggcattcctcgactaatccagttcctctgacctcatgtacctaaactattcccctttctggtctctaatcaaccctagtacttgctttatcacttcgtttttaaatgtattgtccctgcaactagattttgattctgtagaaggcaataactgtgtttcgtgcttcatttgtacctaacacagaatttactggacatcaactagatatttagttatagcgaaatgttttttttttttttgagacagggtttcactctgtcaccaaggttaaagttcagtggctctgtcacagctcactgtagccttgacctgctgggctcaagcgatcctccctcctcagcatctcaagtatctgggactacaggcatgtgccaccatgcctggctgatttttttgtagagaccaggtctcattctgttgcccaggctggtcttgaactcctgggctcaagcggtcctcctgctttagcctcccaattgctgggattccaggtatgaactaccatgcccaggctttttttttttgaaagagggtcttaaatctattgcccaggctggagtgcagtggcacaatgatggctcgctgaagcttcaacctcctgggctcccacctcagccttccaagtagctgggactataggcatggaccactatacctggctaatttgttaatttttttttgtttttttttgtttttttttgagatggagtctcactgtgtcgccctggctggagtacagtgacgcgatctcagctcactgcaacctccgcctcctgggttcaagcgattctcctgcctcagcctcccgagtagttgggactacaggcatgccccaccatgcccggctaattttttgtatttttagtagagacggggtttcaccacattgaccaggctactctggaactccgggcctcaagtgatctgccctccttggcctcccaaagtgctgggattacaggcgtgagccactgctcctgggcctaaaaattttttagaggcagtgttgcccaaactcctggcctcctgcagtcctcctgccttggcctcccaaagtgttgggattacaggcatgagctcctgtagcttatccaataaatgattttgtgtgtgtgtgtgtgtgtgtgtgtgtgtgtgtgtgtgtaatttttctttttttggagacagggtctcactgttacccatgctggagtgcagaggcatgatctcagctcactgaaggcttgacctcccaggctcaagcgatcttcctgcctcagccccacaagtagctaggactacaggtgcttactacacacccagctaatttttgtattttttatagtgatggggtttcgccatgttgctcaggctggtctcgaaacccctgagctcaagcaatctgccctcctctgccttccaaagagctgggattataggcatgagccactgcacccggcctcatttcattctttcagcagtgtctttcacagagcagttgtttttatttttattttattttattttattttattttcattattattattttttgagacagggtctcactttgttgcccaggctggagtgcagtggcacaatcacagctcactgtaacctcagcctcccctggctcaggcagtcctccctcctaaacctcccaagtagctggaactacaggtgcgtgccaccgtgctcagctgatttttgtattttttgtagggacagggttttgccatgttgcccaggctggtcttgaactcctgggctcaaacagtgcacccaccccagcctcttaaagtgctgggattataggcatgagccaccatacctagcctgtttttaattttgataatattgaattagtcaaccttttctttcatgattgtgcttttgctgtcatatctaagaaatacttgcgtaaacccaagaaaacaacacttttctactatgttgtcttttagaagtttatagttttaggtttcacatttagctttgtgatccagtttttgttgagttttgtacaaggtgcaagataataggtcagggttctttttctcccctttcttgtggatgtccagttgttccagcaccatttgttgaaaagattatcctttctccattgaaatgttttggcatctttgttgaaaatcagttcatcgtatatgtgtgcatctatttctagactctacattcttcttcatctagctatgtgtctgtcctctggccaacaccactctgtctttatatagaaagttttgaaatctggttgtgtgaattcaattctccaactttttgtttttcttcaaaattatttaggctcttctagggttttgtgtgtgtgtgtgtgtgttcatataaattttagaatcagctccttgttttctacccaaaacaaaaaacaaaaggccctattaggatttggattatgatgatatatctgcagatcactttggggaaaactgacatcttaacaataatgaatcttctaatacaagaacatgatatatatcttcatttatttaagccctctttgatttccttcatcagtgatttatagttttcatatttttttccatcttttttgttttgagacagagtctcactctgttgcgcaagctgcagtgcagtggtgcgatctcagctcattgcaaccgctgcctcccaggttcaagtgtttcttctgcctcagcctcccgagtagctgggattacaggcatgcaccaccacacccagctaatttttctatttttagtacagatggggttttgccatgtcggccaggctggtctcgaacctctggcctcaagtgatccacccaacctcggtctcccaagttgagattaaaggtgtgagccaccacgcctgaccttttgctagtttttggctaaatattttgtagattttggtgctgctgtaaatggtacttaaaaaaattaatttctggttatttattgctaatacatagaaaagcagttgatgtttgcattttgacattgtatcctacaattgctagactgacttattctggtctttttgcagattccttatgattgtctatgtagacaattatatcttctctgcatagagttttatttcttcctttacaatctacgtaccttttattgctttttctttgctttatttcattgattaggacctctggtatgatactgaatgggaatggtgaaaagaaacattttttgcattattctcaatcttaggggcaaaaatcattttgcctttcacctttaagtggagttgtatatctccttttactagtctaggaagatctcttctattcctgttttttttttttagagtttttacaacattattttaaaagactcctgcctagtgtttcataccattatttatattataccataatttagacaaatttctatttttttacatcaaagttattttctgtaatgagttatgtggctaaagtatttttacgtatctctaaatataaatacatttctaaaagtgtaattactggttcaaaggttacatacacagttttaaagcttttgatacacgttgtcaaattgcccttagaaatgttaacagataatgctcccaccagctaagtgtgtatatacctatttctagaattctcctcagtagtgaaaagaaggtaatttttgactatttgttaaaatagattagtttaattatttctgtcactagttcacagtccttgttaataatttgagaagttgaacttatatattatttttaaaattaatcattacagaaagcaccatattgtcacagttactctaatgcttttttcttttttgtggcccttctaggagctttttagaaaagttcgaagtatcttaaataaattgacaccacagatgttcaatcaactgatgaagcaagtgtcaggacttactgttgacacagaggagcggctgaaaggagttattgacctggtctttgagaaggctattgatgaacccagtttctctgtggcttacgcaaacatgtgtcgatgtctagtaacggtaagaagagaggaaggagtaaaacgagaaatcttcaagaggtatattctcccctcactacacattcttcccagaagtgttattggggcaacataaaggggagaatatatttttagtatttattgatataatattctcattattaaagacaatcttgctttattaaaacgtatactcccctctggaggggatatgaagtctggactgaaatgggcatgagatgggcccattcagcgtaagaaagatagagtcaggtttaaattagtaatgtaaaattatcgtcatgggcaacaaatttttcccgtgtgtctcttatggaaagcaagcaaatgcgtgctttcacatttaattaagtttgaaatttaaaaacacgttgattctaattctaatctctgtgaaaatgaaaggatagttgttctgtagtcaaaaaggtttcaaagctgataatttcatgtcatagaaactgttaggtttctctccgtttacattatctgaagccatttaatctccacagcctgtcaaacctagggcaagacagagagggagaccaaagagcttctggttagtgttcattgtcctctattccacagtcataaactgccatgtatcatctgttttctcttcctgttattgttaccgaggtacttgtgtcagaaatgtctgtcctttaacatttggattttttcttaattattacaactcattgtcgtgccttgctgcttagaaacaagctatgaaaatgcaaaattctctcattctaccaatatttttgactacctatgtcaaaggtaggtaagtcttttggggtttggaaaagtcacatcttctgtcttaaaggaattcaaaatccatttgaaaataagtatttccaagaaaaaaattacttaaaaggtattttgtgatgtagcagtatctcaatgcctgaatggatggttagaccgaaaaataagttggaagaaaaagaaaacactatgttggtgggagagtcacaaaacttttataaagcaaatagagtttgagttggacctgacacaatggggaatacacatttggagaagaaagaacacattctaagcaggctcaagtctgaagcagtaagtgtggctttggagtcacagctctaggtttaaaatttaaagtttaaaattaaattccaggctgggcaaggtggcttatgcctgtaatctcagcactttgggaggctgaggtgggcagatcacctgagatcaggagtttgagaccagcctgggcaacatggggaaacttcgtctctactaaaaatacaaaaattagctgggtgtggtaacaaaaattagccaggcatggtagcgtgcgcctgtaatcccagctacttgagaggctgaggcaggagaatcacttgaactcaggaggctgaggttgcagtgagcagagattgcaccacaacactccagcctgggcgacaagagtgagactctgtctcaaaataaaataaaattgagataagagaagatagtttctactctgccacttcctaactttatgaccttagaatagttactgatctctttaagcccctgtttttaatccataaaatgagattaattcataccacttgtaatattataaggataaaattaattaaaataaatgagattacaaaatttctagcccagtgtttggcctgtagtaagccctaaataaattgaaactatgttagaccttttaggtccaatttgtgaaggttttgaatgttggctatagaatgaggatgattattataataaaaatagtctattcagcacctactaagttgcaatatggatagaggctttatatatacatattatttttaatggttattctaatcctgaatggtcagtgttactagccccactttattgaaccaaaagctgagcttgaaaaggaaaaataacttctcagggtgatgtaactagtaagtggcattgctagaattcaaatcagggattatttaactcaatcacttgccatagtgcctcctgatgtgccatagttatatggaagcaaactaattctccatttctgggctctcattttcattgtggtagccatgacatccatgactcattaaaattaggactagatcccagatcctctggatcacactttaatgctctttcccagttttgaattttatcagataggcagttaagtggtgtttaggtagtttaatggaggagtgatattgatgaaaatggcctttgaaatgatctggcaataagtacaaattggattggaatatgaagaaattatagacaagccacccacttatgagacttttgaaaactttattggattgttttatttatgtattttgcttgagacaaggtcttttgctctgttgcccaggctggagtccagtagcatgatcatagctcactgaggcttcaaactcctgggctcaagcagtcctcctccttgactataggcacacaccaccaccaggcctggctatttttttatttttggtagagatgaggtcttactatttgcccagattggtctcaaaaactcctaggctcaagtgctcttcccgccttggcctcccaaagtgcagggattacaggcaggagccacctcctggcctcctggattattttaaattataagataacaacctatttgaacaagtcaaatggtatagttaatacagttattactctctgcttgcagccccagccagttaatcttccttccctatcagatggtcactgtgaatggttttgatgtaatcatctatagttttcttcatgtttataaaatcacatgaaaatatgagtatgtataaagaggtttttttggttttgctttaattgaattatataaattattttcagtttgtttttttttttttttttacttaataaatgttttgggcagccgtctaggtcattacagatagattttactcatacttttatactaattgcataatatttcataatatgcatataccataacttgttcaaccatctctcttctctctctatctctctctctcatatgttcatttatccttgtattctggagcctgcctccctccctccttgtctttttttttttttttttttttttttttgagacaggctctcactctatatcccaggctggagtacagtggtgtgatcacagctcactgcagcttcaaactcctgggtccaagcaatcctctcatctctgcctcccaagtagctgggactacaggcacatgctcagctaatttttgtatttttttgtacatgtagggttttggggtttcgccatgttgtccaggctgatctggaactcctgagctcaagtgatctgcttgcctcagccttccaaagtgttggcaccatagacgtgagccaccatgcctggcctctttcttcttttccttccccttccctttcctttttgtcttgctctgtcacccaggctagagtgcagtggcaggatctgggcttactgcaccctcaaccttctgaggtcacatgatcctcccacctcagcttcctgagtagctgggaccataaacatgcaccaccatgtccagttaatctttaaattttttatagagacagaatctcaatatgttgcccagactggtcgtaaactcctgggctcaagcaatcttcctgcctccttcccagagtgctgggattataggcgttagccattgcacctgacttttatttctttagtgtatgtttttaatgttttaaacttttttattgaaatatgactaacatatgtgctttctgggttgaaattcttcatttgttgcatttgccaaatttaatgatgtaaatgctgtcctcaggactatttgtaatctactgacagtttgacaagactcacaaaattactgttaaacagttgtctgtcataaaccaatatgaaccagcttcaacacaccaatgcaacatgcttacagaaaggtatacaaatcattactgtacagctcattgtatgtcagtgaagtgaatacaccttagacccttttcaatactctttagtcttttttaaaggtaactaggaccaggtgcagtggctcatgcctacagtgtcaacactttggaaagctgaggcaggaggatcgcttgagcctaggagtttgaggccagactgggcaacataatgagactctgactctacaaataaaaaattaaaaaatgagccaggcatgatagtagtcccacctgtagtcccagctactagggaggctcaggtgggaggatcccttgagtccaggaggtcacggctgcagtggaccatgataatactatggtacttactccagcctggtgacagagtgagacctagtctcagggaaagcaaaaaaggtaaccactgtcctgacttctgacactgtagttgattacttttgagggattgagagactgaaataaaatggtaacagtgaacatagaaacatagaatcctactacacacatcaaacattatgggattattaaatatctaaatttgaaaagctaaccttttataagaatatcaaggaggctattttcatgaacttttgagtagggaaagatttctttagcaaaattcaaaacatgaaggataaaggtataagatttgactgttaaaatttataatctttgatgcagcaaaagatactataaataaatacaaagataaaaccacaacctaggagtatctgtttggagtgcattaactgacagaatattagaatccaggattaaggaagaaaaagaagcaaatcagtaggaaaaaaacagcctaataaaaatatgggcagttcatagaaatgaaaatccactgggtgataaactttagaaaagataatcaatgacagcacttctcaaaataagacatttacgcggccaacaaatatatgaaaaaaagttcaacatcactgatcatcggagaaatgcaaatcaaaaccacaatgagataccatctcatgccagtcagaatggcgattattaaaaaggaaacaatagatgctagcaaggctgtggagaaacagaatgcttttacactgttggtgggaacgtaagttggttcaacagtatgacgattcctcaaggatctagaaccagaagtaccatttgacccaacaatcccattactaggtgtataaccaaaagaatataaatcattctactataaagacacatgcacacgtgtgtttattgcagcactatttacaatagcaaagacatgaaaccaacccaaatgcccatcaatgatagactggataaagaaaatgtggtacatatacaccatggaatactatgcagccataaaaagaaatgagatcatgtccttttcagggacgtggatgaagctggaagccatcatcctcagcaaaataacactggaacagaaaactaagcactgcatgttctcactcataagtggtagtttcacattgagaacacatggacacagagaggggaacaacacacaccagggctttttgggggatgggggttgaggggagggaacttaaaggacaggtcagtaggtatagcaaaccaccatggcacatgtatacctatgtaacaaacctgcacatcctgcacctgtatctcgtggttttttttttttttaaggaaaaaaaaaagacattcaatgttattcattattagggaagtgataaactaagaaaagataaaccatagttctgtaaaattcacccccactagattgaaaaaaaaaatcccattttaaatgtttttaaagacgaatataaccatttatgagggcaattgggcaataatgttgaagatgttcatgtactatgcaataacatcaaattgctaaatgtaccagatatttacaaacgtgaaacaacaagaactctcgcatactgattgcaacagccactttggaaattgtttagcattatatactaaagctgaagtttttctgccataactagcatttcaattcttaggtatatacacaaccaataaacatacatatctcatatgctaggaaatatatacaaaaatgttgtagcattttttatacaggaaagaaaaatgaaaaaatgcctgttaatagtagaatggataaatcgtagcatgtttatacaaggacagtgaatctgaagtacaactacatgggcatggattctcacaagagtaagtttgagtaaaagagggcagacccaaaaagatactacatgatttgttatttaatgttcaaaaatgaaacaaaaactaactttggtgtttggggatacctgtctatagtgttaaaggttgcatgttttctttgtgaaacaaaagcaaggctgggcgcagtggctcacagctgtaattccagcactttgggaggccagggcaggcggattacctgaggtcaggagttcaaggccagcctggccaacatggtgaaaccccatctctactaaaaatacaaaaattagctgggcatggtggcgcatgcctgtaatcccagctacttgggaggctgaggcaggagaattgcttgaggcaggagaattgcttgaggcagggaggttgaggttgcagtgagctgagatcatgccactgcactccagcctggccgacagagtgaggctctgtctcaaaaaaaaaaaaaaaaaaaaaaaggcaagaaagttataaaagtctaggaggcttttgtataactttggagacaaggggttgtggatgtgctttggaaggaaatttaagtggagcttctgagaagctttcagtgttctgtatcttgacctggttaccatacctggtggtatttatggagtttgctttttcataatttattgctgaaccttaaaaaatttttgaaacaaaaacaagcaatagagtgaaaagcttaaaaaccactataggcttttaagttttactgtaatatttagtttcttaaaaactgaaaaagtggccagctgtggtggctcatgccaataatcccagttggggaggtcaagatggaaggatcacttgagcctaggagttggagaccagtctgggcaacatagtgagaccctgtctcaaaaaaaaaaaaagtgtgaaaaagctgggtgtggtggcatgcacctgtactcccagctactccaaaggctgaggcaagaggatcacttgagcccaggagttcaaggatgcagtgagctatgatggcactgttgcattctagcctgggtgacagagcaagaccccgtctctaatatatgtgtatacacacacacacacagattttttttttaagcaaaagatctaaaacaaatatggcaaaatggtaagatttgacacatttggacaatggatacctgagtgtgtgctatgttattttgtactgttggaaaagaaatgaattagctgggcatggtggcgcatgcctatcacgccagctacttgggaggctgaggcacgagaatcacttgaacccaggaggtggaggttgcagtaagccaagattgcaccactgcactccagtctgggtgacagagcgagaccctgtctcaaaaaaaaaagacagagaaaagaaaagaaatggagtctacccaattgctttttcaagatgacatgtccacgggccagtgttgcccaaaagtgaaatgcccaaaattgagctgttagtatgtgtttcagcaatgctggcataagcagatttgtttccttcaagcccctgtttactatgctaatgtttcctgtgaagtcagacaggaaagatctactgtatacaacattttccaaacctctagaccacaggcatttaaaagaattcccttaaggtaattattagcttgaaaaataatacctcccaacagaatcaaagaaactgaagacagtgaataaaaaattgaactagtatctgggagtctgatctcaaccagggacattccctcccacccccacttcaggacatttggcagtgtctggaggccttcttggttattggtatggcatcttagtgggtatggggtgaggatgctgctgagctttctatagtgcacaggagagccctccacaagaaataattatcctaccccaaatgtcagtagtgttgaggtttaaaaacccagcctagattgttgagattgtaagatttaggagaatatgtgttctcattgtttagagcagtttttaagccatttttctctttccatgtcattcacattgattgcacacctccatttaaaacctcttttgtaactttgcagtgattaggtgaatcctagagtataaaattattttgtttgttaattttttcttgaagtcttaaagggtaggcctttaagaaagattcttttagatttatagaggaaattgatataatggattcagctttccctcgttgctctgtagtactgtatacacacacatacagatacatatgtacatatccatccatatatgcagctgcctgtgtccaccaagctctactaaggcataccatacaaggcttgagggaatcataagacatggtcaactccacctctggagtattttgctgcttctgctagttcaactggaaatgactgaagaggcctgtgagactcccttcatgaataataaagcatttaactagaattcagcatttctttttggaggaggacatctgaattaagtggcaggtgaggaagagtggacaagagaaatgttgtcctgtatctaaatctgtacttaagtacaattttaaattggattattgaaactttaaattgctgtgcttttgtcttaattataattgaaatgagaatcctcatctcagaacccctctagaatataaactccaaggaaagggactttttctgttttgttcactgctgaattcccagtgcttagaatgattcttggcaggtaatagttgtgagtgagtaggtaaatgcctgaatgaaagaataaccaacttgaatgagtttcttttatgccctgagactgtagttttgttactttttgtctgtgctgtgggagacatacatacctcagctacaaagaatggcactaaaggcagatttttaagcattctgtatactgttatgccagatacagagcttgtagtattgccactttaagtgtttaaaagcaaaacatgaggagaatgacaggactgagaataggaagagacaccgagagaaaaagagaggcagttaaatcccataaaaaataaagcccggaattgcagacatgacaagtcagccttgggcaacagcgagtgaccggtcaactggaggaggagggatttgtaactgtcctgatggaagatttttataatgtgttgaagaaaaaatgatcagagatgacttatactttcataactgaccactcccttttgaatcttgtgcatatcctttaacactatacctcttcaggtatatctaacagagatccattttgatagatgtgttcatagtatgcagagtattatgtacagttttggcaggttaaattgcctaaggtcacgatataaccactgatagaaaatagtatgtcaccatggacctgagagttatgttggtttattaaacaatttttttttaattaccatattgctgtttacttcactttttttttttttttttttttttgagacgtagtcttgctctttcacccaggctagagtgcagtggcacaatctcggctcactgcaagcttcgcctcccgggttcaagccattctcctgcctcagcctcccgaatagctgggactacaggcgcccgccaccacgcccagctaattttttgtatttttagtagagactgggtttcaccatgttagccaagatggtctcaatctcctgacctcgtgatccacccgcctcagcttcccaaagtgctgggattacaggcgtgagccactgcacccggcctatttacttcacatttaagagcaaactgtccttggccaggagtagtgacacatgcctataatcccagctactcaggagacaggtactcaggagacagatgggaggatcacttgagccccgaagtttgagactagccttggcaacatagggagacactgtctccaaaaaaaaaaaaaaaaaaaaaaaattttaaagtaaactatcctctagaaaccagagttttagagttagcacagaggtgccatttgcttacattatcctattcattacaaatactttacttcagactagcacatgatttgggggcaaaactactgctgggccatgggttgccattaacatctttatgttctgagacagcattgaaaatcctgaacatgccaagccaaggccaggacttaccattccattttcatttctgtttgattaccataattactacactgctgacaacccttgatgattctctagaatttgatccttttggggataagcatgtccaccctcaatactaacaaatatgtcagcagtataggccctgttgcttgaagaaaattactacctgatgctgacaacattcatatctaagattgctgagtgacctgtatgtggatgggtctctttacactaatgccacattgttagtttactactgtgtaaaaataaaaagctaggtgctttctagtgaattcagcttatcaagcagccttcctaaaacattctcaccgactcccttgctccctgagaaaaagaaacccgtcccgaacaacccatttaaacacacacattttagtgctgatcatggactgttaagtgaaaattgcagttgtctaaatagatccttttcccactgtcacatacctttcattcttgctattatccatgatcatatttgcatgcatctgccttgtccactgttgtgtctctgaaaaatcatagtttgaagccctgactcttactataattacattaggaggtgggtggggggcagtaactaggtttagttgaggtcatgagggtggagcccacacaatgggattagtgcccttggaagaggaaacacctgagctgtttctctccctgtcatgtaaggatacagtgagaagtcagccatttacgagccaggaagagggtcctcaccaagaacttaatctgccagtacattgattttggacttcgcagctttcagtactatgagaaataaacttccattgtttaagccacccagtctatggtattttgttatagcagcccaagcagattaaggtatccactcttcatgttctgttccaactaaccaatctcagtgggtctcttgaccacccagtgtccagcagacaacaagtgctcacttacagccctgtcaaatttaccatcccctaaggacaaaaaaaaaaaaaaaaaaaaaaagaaaatcaccatgaatcactattctcagaggatatgttctcactggcccctttccatatttccacagccctgtcaaccatccccagagggtattaagatcatattccaaaacaagtcttcaaggagctgtatagctaggtattcattcattcagagatacatttttgtaaatctgtagtcattctgctagttattcagttttaatacttccatgtgaatatatctgaaaagtttatgcatgattacatgttctttatgccccaattcatgtgaaattcctcttgaccattattttgggatagcagacttttgtttctcttgcattttgtgattttctctttattgcttagtgagctaactttgctttatcctttctttgatagctatgttattacaatatacgttactcttaatgtttaatcataggcctgtcaaatgaagtgtttaatatagccatactagttgtttattgggcccttactgtgtgtcagccactatttgcttttccttagatacctcatttgatcctcccaataacacctcctaagagataggtataatacctcaccccatttttgaaatagaggtttggggaaactgagtgacttggccaaagtcacatggcagagctgggattgtgactatgtccagagctcccttttcaccagctattttatcatgttccttaatctacagtcattttggaatatctcattctgcaggtgtaggggctgaggttcagtgaggtaacttgctcaaatttacatagtagattaaagagctgggattcagtttctgattttgtgactcatattccagcactctttcgatttcagttacagcttatttatctgtggcttattaaagtgcttccatgctgaatgctcaagctgccctctcagatggacatagaggctgtacctcccttgttttagatgacaaaactgaaacttggattaaaagaattgcctttgtttatatagcaagtaagcaaaacttttgatacttaacccagctcttctaaaatagtcttccctgcacttctcaccatatggcagtggcttagattttcatattgtttgttgtcctcatttctctcttttctacacagtaaatctgtaatgtaggaaacttctctttagagatgatagattgtgggccggactattattttcttgtcagtcagttatacacttaatgtcaatacagatgatggaggtaaatatgccaagatgctggctaggattttgtggctggtttaacttatgttcctataaagcagcaaattggatataactgctgatgtttagaacctttagttctaaaatctaatgtcatgttggtgctcttgtatgccaacctgcttttgaatatacttcttggttctcttttgtatttcttagtccattattgtgtattctgggtcttatataagagaaggtagaatcaacttttggcttttgctttggaaaactcttgctttcatgtagcatttcttttcttgaaggctgacttgtgtgactttagaataggcctgactgtgaaattatctatagttgcttgcatttatgtagcctaaatttggagttaaggatacagtagccttttctctggttgtctaaaaaattatctgaaaatgttcccctcttcctaagataatgtctcctgctgaaaggaaatatgcagtgtaacacatggttgattattactggatctgttaaatgatctttcatacatcgtagggaatacattggagagtgtgccatcagttctagtacaaatattctagcatcatcatcgtcagttctcaggaagtttctctagccatccagccttgatcaacagctgaccaagtgcattctggttgataacattaattattttgtgagtatggatgcagtgtacccagttttcacaaagatcttctgttatacctagggcaaagaccatacatacatttcagaactttgggagccactttgtcatcccagaaaaactgttgtatcatattatgaaatagctgttcaaaatggtgctcagagggatgtcatctgtaaattagaatattttagtagaatccctgctgcagtctactgtctttatattctaaatatgttcataagaatgtctctgtgtttggttacaagtaaccttgagctattacaactattagaaaacaattattattggatttggatggaaaccttgtaaggatcttgcttccaaacttttggagaactagtatattctcatggcacataagcaataagcagtaaacatactatatttatagtcaaggtaagtgctaacattatgacattccccaatgaaaagatatctcaaaaatcccccagtatcccaacttctgcataaatacaataaggatctcacctacaacagttttgcgataaccagcaaattctcccttgtcttatgtcatttttgtgtgttctattaaaccaaaatacttattacaacggtacttcttaaaaaaagaagtaataactctacacagttttttttttttttaaataaggtctagataagttcagagttatagttgcaatgatatgacaagggtttccatgttagctagtagcatggctaaaaaagagtacatttatatgagaggaatgtgtgtcttttctaaataaaatttaagacatattactgttgaatcatgaaatgcctgaagctatattgtttgcctcttatagaatgcttacctgtggttcagtcagcattatttcatacaataaagcaaacagatatttttaatgtctttaagtaatcttgttgattttttttattttcctgtctggatgtagctgaaagtacccatggcagacaagcctggtaacacagtgaatttccggaagctgctactgaaccgttgccagaaggagtttgaaaaagataaagcagatgatgatgtctttgagaagaagcagaaagaacttgaggctgccagtgctgtaagtattttcatagaaagacagtgcttgtacactttgagcactgtaaagtagaaatttcaggaagctagatacagcatctccctgctaccttaagagggacctatggcctttttttttccatgtagaaacaacatattaatgtttaggggaatgctttgttccttttagtgcctaatataggggacagctaaattttccatgccagccattcaatctaagcctgagtcaggtcactgagttccaaaaatctgaaatggatgggtatagttcagttttctgagcagtagattctacacttgctatcagattctcacggggattctgaccccatgaatctcagtgtttattgtgcagtacaactttcatcatcaagatgctattattcctccttacacaacagccagaggagaggacaaggcttcatgatgaactggaagaagccaaggacaaagcccggcggagatccattggcaacatcaagtttattggagaactctttaaactcaaaatgctgactgaagccatcatgcatgactgtgtggtgaagctgctaaagaaccatgatgaagaatccctggagtgcctgtgtcgcctgctcaccaccattggcaaagacttggactttgaaaaagcaaaggtaaaaatccaaaagctcagaaaccttcgcaaaggctccttgtcagttgcaaaagaacttagactgtcaacagaatagttctatcttttcccaaaggtctgggctgtttatttttcttcttttgcccgtctcattgtcagtgttcaaccatcgtgctccttacatttccatcagagtcagagatgaggagggtcccaaattgtgtaaaagccagtttgtagattcttcagattatttgtcccatattcttttttcttcttctgtaaccatttcccaatttgggaacagaaatatgcaaagaaaaactatggcctaagggtagtgcagaaatgaagacccagtagtgcttctagagtttatactctaattgatgacacagccatctaaccataatataagaaatcattaaaaatactgtaataatgtatgctatttaaggggtatagaaattagaaatgcttcaaagaaataatgtcagaaacgctccataacatctgattcagctaggattatgcttagctgtgacagaaaacccagtggtttatacaagattgaggtttacttcttatttatgtaaacaaagctctgaggtaagtcctttcagcttaacattctgtgactcctaaagtttaacccttgtcctaattattctcaccagagaaggtaggaaaaggggcaaaagacacagccacctcctctctctctcttttttttttttaagtaacagggtcagccgggcacggtggctcatgcttgtaatcccagcactttgggaggctgaggcgggcagatcacctgaggtcaggagttcgtgaccagcctgaccaacatggagaaatcccgtctctactaaaaatacagaattagccaggcatggtggcgcatgcctgtaatcccagctacttgggaggctgaggcaggagaattgcttgaacccgggaggcagaggttgcagtgagccaagattgcgccatcgcactccaggctgggcaacaagagtgaaactccatctgaaaaaaaaaaaaaaaggaaaaaaaaaaaaaaggtaacagggtcttgccctgtcacccaattttttttttttttttttttttttactttttgtagagatgatgggtctcacttagttgcctaggctggtcttaaactcctggcttcaagcagtccttttgccttggcctccctaattgctaggattacaggtatcagtcactatgcctggcccctctggtctctttaggaaggccctaggaagctatagcataacatttccatttatattattgcctatcattaatcacgtgaccaaagccagctgccaggagcctagaaaaatgtagtctttattttaggtggtcatatgaacaactaaaaattctaccatatggccgggcacagtggctcacacctataatcctaatactttgggaggctgaggcagaaggattgtttgagctcagcagtttgagaccagcctgggtaacatagtgagatttcctatgtccaaaaaatcatacacacagaaaaatttagctgggtgtagtggcatatgcctgtctgtggtcccagctacttgggaagctgaggcaggaggatcacttaagcccaggagattgaggctgcaatgaggcataattgagccattgcactcccaactgggtgacagaacaagaccctgtctcaaaaaaatacaaataaaaattctaccacattatattttggctataaattgatattcctagaccatttagaaaactacatgggctggacgcagtggctaatgcctgaaattccagcacgttgagaggccaaggctggaggattgcttgagcccaggagttcaagaccagcctgagcaacataatgagaccctgtctctacaaaaaattaaaagattagccaggcacggtggcacgtgcctgtagtcccagctactcgagaggctgaggtgggatcggttgagcctgagaggttgaagctgcagtgagccgtgattgtgctactgcactccagcctgggcaacggagtgaaaccccatctctaaaaaaataaatagataactacataaataaataactgtaaattggtaaaattacgtttaagtttctcagacaggagtactaatgattttgtctcttgcagccacgtatggaccagtactttaatcagatggagaaaattgtgaaagaaagaaaaacctcatctaggattcggttcatgcttcaagatgttatagacctaaggctggtgagtgggaaaaaaaataataataagcctgctggtccagtctctttaaaggaattgggttggggaaggatgtcctgttgtttacatgtgtaaagatagtgcttttgcttcaggactcagaatttggattggcaaactttccgtgggagagttctgagaagggacaaaaggcctattgccagttacgtgcttcttctccttattctgattatcaaaccatattgcaattttgtttgcgctttgtttttttttttgagatagagtctcactctgtcgcccaggctggagtgcagtggctcaatctcggctcactgcagcctccgcctcccaggttcagatgattcttctgcctcagcctccggaatagctgggattacaggcacatgcccccacacctgggcaatttttgtatttttagtagagacaggatttcacgctgttggccaggctggtctggaactcctgacctcaaatgatctgcccacctcagcctcccaaagtgctgggattacaggcgtgagccaccacgcccagccacttgcaatttgtaatcagccattctgaattcaaactccattcaaatgtaaattcaattaaatttagtctttgtgagctaaataatcagcaagtctcatctccacagtaaatacctttaactctctgagccttacatttttaatctctaaaatgaggatgttgcctaccttgcagatttgttgaagagtcaatggaataattacgtaaggtgcccagctcagatattggtgttttcttctctttcgtttttcctgtgaccctcctattctgctgctgggttttttttgtttttttgtttttttgtttttctcatttctcttaccgggtgcagtttttgttactactacttttctctgttttaagtttaactcctacagggagttactcttttgtaagtttcactcctacagggaatatactacatcaagccctacactagagaaagtgaacaaagccctacctcttatttctcctccacccaggccagatagcattgatgatgattctttatcttgctaagactagatgtggttgtcttcacccatgttatcaaccacttatatcagatgttgggactgttgctagaaagagaagggagaagtataaagtgacaacttattttgtccttaatacaggggataaccaaagggcagagtggtatggacctttgtgtagaatatcagaaccatgatattggagaaataaaagcatgagtcatccttgacttagaacccctatggaatgtgatatgatctgagtagtaatcccacagattaaggcaaggccaaggaatcctcatcatttttatttttctctcctcctttcaaatgtacaaaatactgatacagataaaatccatttagtccacagagaaatatatgccatgcttaaaaatataataataaatttgggccagtctttcaccctgttctttgtatccattggctattggaatatgtagtatacaattggccagttttgactgagaagattttaatccttcagctctaatcctaaactgctcatagtgtcatctataagatacatgagaaactgccataatacagcttttgtaggtattttgtacttttccagtagtaaaaattgctaatttttaaattttaaaaaatgttcagtttatctggcagataaccttattttctgcttttatagtgcaattgggtatctcgaagagcagatcaagggcctaaaactatcgaacagattcacaaagaggctaaaatagaagaacaagaagagcaaaggaaggtccagcaactcatgaccaaagagaagagaagaccaggtgaggccggaatccaccagggtttagagaacttggaagtttcaggaatacatattaagaattatgtatttaggtataaaatgagatcagaaagaacagcccaaagaatagagtggtgattgttaggtgaagcagtttcacctgaagagtaaagttactgagtaaaagtagagaatgcaggaacaaagcatgatttctttcactacttaaaagccagtaagcaataagactttattgagcatcttctatatactcagaattggtgagactagaaaaggaagtggaaaatgtagttacttccctctcaaagtgtacagtttatctggtaaggtaaaacttttgacaagcaaaagaggaacatttgttaagcaaatggaagatagtatatcaattatgaaatgtgttctccattaactgttaaaatttagagaaaaagaagagagacagaaagctgaaagaaaactttatttaagaaaggggcactttgtagcaggccggacgcagtggctcatgcctgtaatcccagcacttcgggaggctgaggtgggtggatcaattgaggtcaggagtttgagaccagcctgaccaacatgatgaaaccccgtctctactaaaaaatttgctggacatagtgatgtgtgcctgtagtcccagctattcaggaggttgaggcagaagaatcacttgaacctgggaggtggaggttgcggtgagccgcgatcgcgccactgcactccagcctggggaacagagtgagactacatctcaaaacaaaacaaaacaaaaatagagacatgcaaaaaaagtgaaagatgaagtagaaggcattttaaacctgagacgatagtccatttactaagtttaggaacgttggaaaagaaaacctttttcagagggaaatgataattttctggctgatagtaaatactcagtaaccattagttattgtcacagacacagtagagctcatagtgaagttgttaggagagatgaattctgcatggaagaaagtttacttttaagtttcttgagataccacacttaccttcctcgctctagtacctagtgcagtgccttttgggtaataacttttatttattattgaaccagattgagagggaaaaggagaagataccaaagcctaattcatggaggatattcacatatgactaaaggaagaaaagaactcttggaaaagtgccagacaagtggagagaaaggactaagatacaagtgtcatagagacaaggaagaagcaagtctgtttatgatcagtaatatcagatagcacggagaaaatcaagacgttatgttaggaccagaaaagcttttggatagacagttcggtgatctttcaatttattaattcattcagcaagtatttttttttgagatgagtctcgctctgtcgcccaggctggagtgcagtagcgcgatctcggctcactgcaacctccgcctcccgggttcaagcagttctctgcctcagcctcccgagtggctgggattacaggcgcccaccaccacgcctggctaatttttttgtatttttagtagagacagggtttcaccatcttggccaggctggtgttgaactcctgaccttgtgatccacctgcctcggcctcccaaagtgctgggattacaggcgtgagccaccgcacacggccctcattcagcaagtatttattgtctgtcacttaacaaggcactcaaagtcccttccatcatgcggcttacatcttatggtagaggggagagaggagacaataaataataaatacttaaataaaatatatcatttgtcaaataaatttgtagaaaaacaaagaagggagaagggactagggagtgcaaatcttggtgagtagggtgcagttttaaacaggaaaactggggaaactataaaagttggtattgtttgagcaaagacctgaagcaagtgagggtgttaaatcatgtggaaatctggggaaagagacttttaggcaaagggagtagtaagtacaaagaccctgaagcagcattttcaaggaatagcaagggggccagtgcagctgaacctaagaagggcctgacggggagagtggtagaagatggggacttagaggcagcaggagccagattatttagaggccatttgtaaggaatcttctctttttctctgaatgagacagaaaggtatcagaagtgttttgaacaaaaaagtgacgaattttgtactttactaggatcacactggctgccatgatgagcacagctgaaggtagaagcaggaaggccaaaacacgtctctgcagtaatctaggaaaggggtgttggtggcttaaacaaaactgctaatgttggtagtagattctgaatgtattgtataggtttaactggcaaggtttactgacaaaaattggatgtgaagtgtgaaagaggagtcaaggttttccacctgtgcagctgaaatgttggagaagcagatttgggaaataaagcatacttctgtcatttgatcccattaaatacaatatactttagaataaataatttccatctgacttctccgaaagtgttctagtcattaattctgtgaatactggatttagccctgccttctccagcaccaggtattcatttgtgtcagttgtttgtttctaggtcagtaatgtttcatgggtgatccaaaataagcagtgcttctgctgatacagggtgcttctgctgatacagggtgcttctgcttatattttcctgccatgggattaaagatattgtcatcaatgctttaacatcttctgttgtctttctccttggttttgatgaaaatattgctcactctttcaatgtaaaactgacttgagacagatgagagactcccactctgttctccctgcaggtgtccagagagtggacgaaggtgggtggaacactgtacaaggggccaagaacagtcgggtactggacccctcaaaattcctaaaaatcactaaggtgagtctgacatttaaagtacaatttacgctctcctttgatgcctttgatattaaaacacacacacacacacacaatttacaatagttgcaaaacgtgtctcaaaagtacttattaaagtaaaacagcaatattgcaaatccatggggtggttattttttaatgcatttttcttcaagttactattgatcaatgtattctacaaactcatttctacattttctttttttttttttttttgagatggagtctcactctgtcgcccaggctggagtgcagtggcacgatcttggctcactgcaagctccacctcccgagttcacaacattctcatgcctcagcctcccaagtagctgggactacaggtgcccgtcaccacacccggctaattttttgtattttttagtagagacggggtttcaccgtgttagccaggatggtctcgatctcctgaccttgtgatccacccacctcggcctcccaaagtgctgggattacaggcgtgagccaccgcgcccggcctcatttctacttctataaggatttactaaagaggaaaagactaggttacttcttagacataagatgcttaatatacaagaggtaataacaaagatattttagaagcctaagtcaattgcaggcttttacacaatgtatccgtagctctggggaaaaaagcaatcacctgtttaaacctaaccatgaaagatttgccttatccaaggcgtaaaggaaaccacagagggcctactagaaatcattctgtaataaggatttaagagactctgtctgctttcctctctttttgagagtctgtgggcagtaagaggaaaaaactttctgtagcaggtattttcagcagtaaaagttgatcattgtaaggaggatgaagaactttggagaatgtagagaaagcagaattaaatatgataagagtggaaacttctaaagtccagtgggttttccaaatcatttgcaagtctagtttgatccttatacttcccatagttctgaaaatcggcaccctgctagcaaaatactgaagacaatcaaaactaatgtgaaaatactacatgaaagaagataactgacaagaagtattaagaaaagtctttaagaaaattggaataaaatgggctatgtcatttgcatcttcacagttttgtcaaagctttgcttcatgatagaaaattctccttctgaatctctcttaataatgtaattagctaggatccttttctccaagattctggtactttcttctagttgtttatatctcagagtaggaattccattgctgaatacaatttgagtcttacccatctccatttccatctagagacagttttaaccaaaagtttatgtttaaagaagtcctccagcattttgaaaaatgtgtcggtatttaataacaacatttgtatttttaaatattatgctttccgtgcttggatactataaaaacagtgctggtatcaaacctccaacattactaccttaatatttttaagtatgtaaattgctaataaactttgtgtattcagatagttatactggaggtactatacatgggtatcctagaacaaaaccgttatacatatttattgttaattgggagtggtttgtgtgaaagcatattacatagcatagcaacatatatattatgagctgtcagaccatagaaataccttttttacaaagcgctacattacagcttttatgttatatgtattttataataatatgcattacagcgtaattttatttcacttgtagtaaagttgtgcttggaagattaaacatgagatatcaggcaccttaacttcctgtgctccctgcctaacattccaatctctttcttcttattctttattgaatactcacatcccactgcctgtctctagccaacatgaaatttttatgtctgttgatctgttttctgacagtcatgtaaagacactaatgaattaattttgtagtatttgtattttttatttttaaaattaatgggtattgtacaagaagaatgattagaaactgcttattacagttagcaaattcataaaccatcttaaacaggaggacctggatgcattctctagaccaaacagttttttgtggaaactggagtccagggaagtgcttcaggggccacatggatcccagtttaatgagaacagctccaatttctgtttctattaaattggcattccaaacaaatttttgttgctaaaattggttctacttcactgaagaagaaaaaaataaaagaaaaactattcttctagaatatttcctataattgacttgtggtcccttatgttacagcctacaattgatgaaaaaattcagctggtacctaaagcacagctaggcagctggggaaaaggcagcagtggtggagcaaaggcaagtgagactggtaagtgtgtgtgtcccttctcaaacctggctgtggcttgttagcatttgccttacagcgcattcccatagtcatcgaatgatggtttttgggaaagatgtgtagactaatcatgcctaaaattttattggtagccctttcctttcaacatagatcctttctcaggatccttaaataattttaagtatttttttaatttcaattcattcatttagactatttaattaagacctttatttatttatttatttatttatttatttattatatttttgagatgggatcccgctctgtcacccaggctggagtgtagtggcatgatcacaactcaccacagcctcaaccacctaggttcaagcaatcttcctgcctcagtctcctgagtagctgggactacaggtgcacgccatcacacctggctgatttttttttttttttttaattttttgtagagatggagtctcactgtgttgcctaggctagtcttgcactcgtgggctgcagtgatcctcccaccttggcctcctgcgtgctgggattacagttatgagccacactcagccactaagaccttaattttttaggttccctttttgttgttgttcacaaatttaatatagctagagaaattactgggaccctaaattaaaagggaaactcattatgctgataaaagaatcttaatatgcagagcatttactataattttagggagctgtaaaagaataaagaaacattgttcaaaatctttttcgaaaatcagattttgagagatttgacctcaggaccaaagatgtttggatctcacaaacacatcttactagcttgaggaagcccaatggaaagaaaaaaaatttaatgttaacctacttcctatatgtcccttctactaagtaatttcaacctttttttctttaaattttaaaaaatgtcattattcagtaaaacccacatgcatatttgtgcacaaatgagattggagcatttgtgctggttagctttgttaaagttttgttctgttttcgcttgccttcctcctcctatatgccactcccacccctgtttactatgtttttaaaggaaccaatggttgaaataaataaagacttctaaactctattatgtgcaaattccctctaacactttgcttctcagaatatggtagagggaccaggagatgggcgtcacctaagcttgttaggaatgcctggtctcaggccttacctagggatgcagatgactgattatttgcattttagtcatgtgatttgtatttttttctaaatcctcgacatgtgtagatgccttacggtcaagtgcttccagtttaaacagattctctgccctgcaacctccagcaccctcagggtccacgccatccacgcctgtagagtttgattcccgaaggaccttaactaggtgagaaccctgctttttatgtctactcaaggctggcccgcttgccagtatgtgtggcaagataagaacaagggttttgatagtaatccttatggatgcattccttttattcctaaagttgatttctttaatcttcacacactataatttctaagataggaacataattgggtggtgaatttgggatgggatgggagggaagggattcttaagaaagctaggcccacccaaacagccctggaggcatgtctaggggctccgcaagctaatcctccagatgttctagaagcacctagcattctcaaccatgggaattaaagaacatgacaatccacccatacatttctctgtcacactcttcatgttatatttgaggttgtccttcagtttttgctagtctccatatttcactatctttctgcttttgcttttctaggattgatacagtcaagtatcctgttggctggtttacataaaatgaatgggcaccctgtagtgcagtcacaaaaaataacattttttacataagcactttcagaattgaagtttctttaagctctaaaactttttttttttaattattattttttagagatggcatcttgctatgttgcccaggctggcattgaactcctggtctcaagcgatgctcccatcaggctttttattattattattgtaataagtttgattaggtagactttgtaaactgtgttcttattcccttgacttctattgaaacaaagtatagttagcacaaggcagcttttcatgatgattcaggttgtcattgagtatcacttgtggcgctttgccctgtcataaatgtcccctaatggttctgcttcctaagcacttgtgtatgttctttcacaatagttagaccattttcctgcccgagtctctccttttcccttttaatttgctgcttctggtccgccacgggccaacgaactgtttgctcagctggttagaattgtctaaaagaagacgaatcaggaaatatggagagtctctcttaaaaggaataaaatatatagcgttggctaatccaagacagcttcttcttgattctcaaatattttccatatgtttaaagattctaaataaaaaggtatcattgcataatttctgagatagtgataccatgttcttataatatttgtttccctttcatttatgtaactcatactttatcattgtcttctttattcctgaaagattttttaaaactaaaaaaagaaattgccaaaattaaggccgggcacagtggctcacgcctgtaatcccagcagtttgggaggccgaggtgggcagatcacctgagatcgggagttcgagaccagcctgaccaacatggagaaaccctgtctgtaatcccagctactcaggaggttgaggcaagagaatcacttgaacccgtaggcggaggttgcagtgagccaagatcacgccactgcactccagcctgggcaacagagggagaccctgtctcaaaatacataagtaaataaataaataaataagttcagctccaaattggggaaatgtgggctccacagaaagaagtggttataattactaggggaacagggcccttttactgagagaggaacacatacaccctcatcaacacagaggcaccgacacagaaaggaagaaacagagtcttggagaaagagacagagtcagggtacccggagtcagggacagagcacacagacccaggggacagacagaggtgcatagacgatagattcccattcgctcagatggagccagagcaatgcccgggcacagagagacccagcagctgcagaacagaggagacgtaggatagaatggtggctagacaggcgagggcaggagaggaggagcaagcaggggccttcatggggatctgtctgtccgtacagcgagaactaccagcctgctcatccgatcatcgcnnnnnnnnnnnnnnnnnnnngctctctgctacttcctcctcgcagtttcaggccagtctcatgcctcagcctcccaagtagctgggattacaggcacccgccacctaacccggctaatttttgtatttttagtagaaacacagtttcaccatgttggccaggctggtcttgaactcctgacctcaagtaatctgccctgctcggcctcccaaagcgctgggattacaggtgtgagccaccatgcctggccaccactgacatgttaaagtgttaaatagtatcccttcagagaaaaaagttaaaacatcttaataaatattccctttaaagcactcttttacttgtttgttgaataaactttgaaatataattggtgcctcacacatctaatgttatctgtgaaaaattctgtatactttcagaaagtcttagtgttattttataatttgaatatgtgggggacatgggcttgtctttcctttgaaaagtgttgttttgtcttttaagtcgtggaagtatgggcagggagaagaatgacaagccccttccatctgcaacagctcggccaaatactttcatgaggggtggcagcagtaaagacctgctagacaatcagtctcaagaagagcagcggagagagatgctggagaccgtgaagcagctcacaggaggtgtggatgtggagaggaacagcactgaggctgagcgaaataaaacaagggagtcaggtgagagacttggcttaaacagatgcagatttgggttttaaatttggaaggaaaaataaaaaagagactgtgcctgagtagattttagaattaacacataatagcaacacataccagcatctgaagagttaaagggtacttcatagttttataacagttctcattccctaggtatgccttagctgaacagtttgtaaattttctcctttctctattaaatgttatggtgaggaggtcctcctgctgtattttaagcaatctgaatttcttacaagtccctgtaacatcccacacttgacgttgctgttagattgtgtatgctgtgtagagctcctcaaatgtgtgaaaattctcattgagccactgcaagacaaaccaaagagaaggtattaggttatctttagctgacttcatcttccgtggtaacctgttgtttttgtatgcatttagcatgtatatacttagaggacttgctcggataatgctctaaaaattgcttcatgtatttaacctgtgtttcagtttccttatctgttaaatggggataagttgtacctaccttttcaggatattatgaaaattaaataagaagttaatacacgtaaacacttagaacattacgtgataaatacaaggttttcaaaaagtattaaatgttgtgatgacgaatatagcaatggaaaacagtttaaattgaagattattttcagcctcttttaaatattagtcatgaagtaatagcagttttagttttttagtatttatatagctttctaatttgtttcactatataaattgtatctcttaactgtagtccctaaatggatctcagagacaaattgaagtgtcttctcccaattggtgtaactttagataatacagctttagggacatatggcttttttaaaatctgtgctagatacttttgaaatataacaggataggacataaaatatcttgggtgtaatgaataatgtagcacagctgccctatgtgtttttattgtctggttcatttgtacacttaccagatgcacagtgaatgtgaggcccttgatccctgttctcggccttcagtctgctgagtcagaaagaccttttttagtaattccacgaaagacacaaactgagaaaggtgctatgaaggaaggaatttagttctaagagaatacttagaactatctggtaccaaggagctatgtagaataggggcaaggggaggtttccttcatccgaaggaccagtaggaatgaaacaggttcgtaggcaaggatgggtgtgaaacagagggaaagagcactccagacaggattactgtgagcagagctgtagtaggaatagccacggtttgttcaagcagctgcccaagatcagtgtggctcaagcttagtggcgagcagggccctgacctgtgcaggattgtgaagacctcatgtactcttcatctttgaagcaatggggagcaatcataatacagaaaggaacaaaaaagctttaattaggaaagtttatcatgttcctaaatcttgttcattgttattgtagattataaagttacttagtgcgaatctattctaaaacaaaaggtttctgtattctgtttttatctattaaatgtcttgtagctattaaaataatgtaatagcacataatattgtcaaccataatctcactattttaatagtaatttttattatttttactttttttggggggcctcactaatagcaaaaccagaaatttcagcaatgtcagctcatgacaaggctgcattatcagaagaggaactggagaggaagtcgaaatctatcattgatgaatttctacacattaatgattttaaggtaaatgagattaaaaaaaaaacacacacacagtaagtcctttgatagtatataataacttggttctggtctaaatcaggtgtcattgtgaactgataagacttaggttgagtaatacaagtcctacacaattcagtttgcttaacgctgatgcatttctgccaagtactctcttttaatttgatactataatttacaacatagagtggtgggcagagagtatgagtaccaatccatccccactaagggaaaaccaaattgatttctatattaaggaacaaaaacaacacattatcattatgaagcatttctggcaccctgtatatagctgtcatggtctttttttttttttttttttttttttttttgagacagagtcttgctgtgttgcccaggctggagtgcagtggcacgatctcggctcactgcaacctccgcctcccaagttcaagcaattctcctacctcatcctcctaagtagctgggactacaggtgcccgtcaccatgctgagctaatttttgtatttttagtagaggcggggtttcaccattttggccaggctggtcttgaactcctgacctcaaatgatcacccacctcggactcccaaagtgctgagattacaggcgtgagccaccacacctggcctgtcatggtctttataatcattctgttatcattctcatattaatcttgaaatatggccagcattactttttctttatttcataaaactgaggcataaagaaacaagcaatgtgccaggtcagacagcctaagccagagatttcaagacaaggccttgaatttgccctttaacccttaccttctctttaatcttcattttgagatagtagtgaataagacatttctacctgaccttgtgaaccctatagtctagtggcagagacaaaccataaacaaataactccactagcagttacttaactgtagttatgataaatgctagtagacctataggtcttaggagaaatccattaatgggatctgattaagtgatgtgaggtcaggaaaggctaatctgttaaaacagtcttatctgttaaagtatttgtcagatatattaactacttttgctgctttggcactatattattaaaaattctttcaagattatttgttttcttggccgggtgcagtgactcatgcctgtaatcccagcaccttgggagctgaggcaggaggatcacttaagctcaagagtttgagaccagcctgggcaacatgataaagccccatctctacaaaaaatacaaaaattagccaggtgtggtggcacgcatctgtagtcccagctactcaggaggctgagatgggaggatcacttgaagcccgggaggcagaggttgcagtgagccgagatcatccactgcattccatcctgggtgacagagtgagactgtctcaaacaaacaaaaaaaaagaaaatattacttgttttcttaacagtgtaatcatcatctgctttccacatataaaaatcaccttggttatctatagttcaatcttctaaagccttcaagcctctgaaattcttcaaaattcagaagaagtagaaggaagtttttgatgatgagtgaggtggaggtgagtgctttgcagaaactgttggaaatgtaccaaagtaaatgaacattaacgggaaatagccaaagaataaacctgatgtactgtgattcatcagttagcctcctggaaaattaggggtattcttataaattggcagcatagcctttttcttgcatggaagtagggaaatgtgaacgaattgcaaaaaaattagaatggccaagaaagatgaaacgccaagacagtaaggaagaaaacagtggagattggcttcagatgtaatttgaaggatgtacaaagtcaatgaataaccctttaaaaggggaaaaatatgatcctgtgatgaactggaggtatagggagtaaaagaccttagtaacacctaaagagtacaataggaggactctttggagaatcatgagccctgggccaggcttgcaatacagaaggggcagaatcgttgtatctttagaatttcattgtgcagtgtacaaagcaactgtgcctgcaatatggttaaaacaggtattaacattgggcatttactgaggacttactctgcgttgggtgctgttgtacatattcggcatgtattagtttgtattgtcctcgtaacattctcctgaagttgatgttattatcatacccatttttcagataaggaaactgaggtgcaaagatgtaaatcaacttgttcaaaatcttaactgctaataagtgccagattgaggattcaaagctaagtttctagcttcagaggagaaaatgctttatctcattacctttggggtattagtgtgtcaggctaaagacttaaagagctgatcttaaaaatattttttccaaatatcttcctattaggtgctattgtttttaacagtgattcaaattaatatttattgagggtttattttgtgcctggcactgtgccaagttcttatacctatattttatatacattcctcacggtaactctaaaaagttaagcccaagagattaagttaaactcctaaactctaaagtagtaagtggcagagccagggttcaaatgcacctctgtctgaccccaccgtgcatgttttagcctctatgctatttatttattgaatacctaagtgtgctagccacattttaggggttatgactgggtataccatatttgtagtgaacaacaaaatctgcttccatggagcttacattccagtggggagatacagacaagtctggccctaaagataggtagtaaattaataaataaacagtagctaccaaaaaaatgttttcagtgccaaaaactaaaattatgtgatttgatggagtcagggaagacaggaagtatcatttcaactaaaagctcaaagacaaaaagaagcaaaccataagaaaaccagatggaagggcgaggttatgaactgctatgacactgtgagtataatgatatagctggaagtattacccttgaaaaccagcgcaagacaagaatgtcctctctcaccactcctattcaacatagtactggccagggtaatcaggctagagaaagaaataaagcatattcagataggaagagaggaagtcaaactctccctgtttgcagatgacatgaacctgtatctagaaaaccccatcatctcagcccaaaagcttattaagctgataagcaacttcagcaaagactcaggatacaaaatcaaagtgcaaaaatcactagcatcagtcaagctgaaagccaaatctccagtgaactcccattcacaattgccacaaaaagaataaaatacctaggaatacagctaacaagggaagtgaaggatcgctacaaggagaactacaaaccactattcaaagaaatcagagatgacacaaacaactggaaaaacatcccatgcttgtggataggaagaatcactgtcatgaaaatggctatgcgacccaaagcaatttatagattcagtgctattcccattaaactcccactgacattctacaaagaactagaaaaaagtatttaaaaattcatatggaaccaaaaaaaggagcccaaatagccaaggcagtcgtaagcaaaaagaacaaaactggaggcatcacactgccctacttcaaactatatatatgtattttttttattttttatttatttattatttattttttttcttgagatggagtcttgcactgttgcccaggctggagtgcagtggcgcgatctcggctcactgcaagctccacctcctgggttcacaccattctcctgcctcagcctcccaagtagctcggactacaggcgcccgccaccatgcccggctaattttttgtacttttagtagaaacggggtttcacggtgttagccaggatggtcttgatctcctgaccttgtgatccgccctccttggcctcccaaagtgctgggattacaggcgtgagccaccgcgcccagcctacttcaaactatattacagggctacagtaaccaaaacaacgtggtgtggtacaagaacagacacatagaccagtggaacggaatagagaacccagaaataagactacacacctacaattatcttatcttcaacaaacctgacaaaaacaagcaatggggaaaggattccctttttaataaatggtattgggatacctggctagtcataagcggaaaattgaaactggagcctttctttataccatatacaaaaatcaactaaagatggattaaaatgtaaaactcaaaactatgaagaagaaaacttacacaataccattcaggacataggcacaggcaaagatttcatgatgaagatgccaaaaacagtgcaacgaaagcaaaaattgacaaatgggatctaattaaactatagagcttctgcacagcaaaataaactatcaatcaacagaataaacagacaacttacagaataggaggaaatgtttgcaatatacacatccgacaaaggttttttttgttgttgtcttttttttgtttgttttttgagatggagtgttgctcttgtcgcccaggctggagtgcagtggcgcaatcttggctcactgcaacctctgcctcccgggttcaagtgattctcctgcctcagcctcccgagtagctgggattacaggcgcccgccactacacccagctaattttttgtatttttagtagagacggggtttcgccacgttggccaggttgatctcaaactcctaacctcaggtgatccgcatcccaaatactgggattacaggcgtaagccaccatgcccggcccccgacaaaggtcttatgtgcagcatctgtaaggagcttaaacaaatttacaagaaaaaaaaaacacacactaaaaagtagacaaaggacatgaacagacagtactcaaaggaagacatacatgtggccaacaatcacaagataaaaaagctcaatatcactgattattagagaaatacaaatcaaaaccacaatgagataccatctaataccagtcagaatgactattattaaaaagtcaaaaaataataggtgttggcgaggttgtggagaaaaaggaacacttttacactgttggagggtaaattagttcaaccattgtggaagtgtggcgattcctgagagacctagagacagaaataccatttcacccagcaatcccattactgtgtatatacccaaaggaatataaattgttctcttataaagacacatgcacacgtatgttcattgtagcactattcacaatagcaaaaacatgcaatcaacctaaatgcccatcaacgatagagtggataaagaaaatgcggtacatagacaccatgaaatattatacagccatacaaaggaccaagatcctttcctttgcagggacatggatagagctggaggccattatccttagcaaactaatgcaggaacagaaaagcaaatacttcatgttctcacttataagtggaaactaaatgatgagaacacatggacacgtagaggagaaaaatgcacactggggcctactggaggacagaaggtggaaggagagagacaggatcaggaaaaataactaatggatactaggcttagtatctgggtgatgaaataatccgtacagcaaacccccatgacacacatttacctatgtagcaaagctgcacatcctgcacatgtacccctgatcttaaaagtttaaaaaatatatatcatgatatagctaattgaccctttatgcaaacacagtgaatgaattcccattagaagacatttaatcacttccatttaaatactgaggaatgatttttatttatttatttatttattttttggagacagagtctcgccgtgtcgcccaggctggagtgcagtggggtgattacagctcactgcaacctccgcctcccgggttcaagcgattttcctgtctcagcctcccgagtggctgagattacaggcgtgtgccactacacacggctaatttttgtatttttggtagacacggggttttaccttcttggccaggctggtctcatactgctgaacctcaaatgatctgcccgccttggcctcccaacgtgctgggattacaggtgtgagccaccgcttccagcctgaggattgaatatttgcattcatttacaagtcctcttgaaaaggcataacaatgatgttgattggcttaaaataaggttaaaaaacccacaaggggccaggtatggtggctcacacctgtaatcccagcacttttggaggctaaggctagaggatcacttgagcccaggaatttgagaccagcctgggcaagatatccatctttacaaaaaaatttttttaaattagccgggcatggtggcatgcctgtggtcccagctacttgggaggctgaggcgggaggattgcctgagcctgggaatttgaagcagcagtgatctataatcatgccactacactctggcctgggtaactaagtgagaccttctctctttaaaaaaaaaaaaaaactaaaagacccacaaggatgaagagaccagggaatagacagaagcaacgttctggaagttggaaataagaaggatgagtggtaatttatttaacaaactaagactgtctgtgaggtacagatgtggccagaaacaaaagggaattagttggttaaaagcatatataagaaacattttacagccgggcgcggtggctcacgcctataatcccagcattttgggaggctgaggcaggcgattacctgaggtcaggagtttgaaacctgcctggccagcatgaagaaaccttgtctctactaaaaatacaaaattagccaggcgtagtggctcatgcctataatcccagctacttgggagactgaggcaggagaatctcttgaacctgggaggcaaaggtaacagtgagccaagattacgtcattgcactccagcctgggcgacaagagtgaaactctgtctcaaaagaaaaaagaaaccattttacatgataattgtcttgaatgtttcaaaaatggcaatgtcatgaaaagacaaaaaagagaaaggacgattttagattaaaggaatctgaacaacataacatgtaaagtcgggttctcaactggactcagcaacaacaaaaagctatattagacattcagagacagttgtggaaatttgaatatgtactatatatcaaatatttttattgacattatagtaaatctcttggacattcagaaagaaaacaacaattgatgaatctaaaagtgaagatatgtagttgtatattgtatgactctttaatttttctgtaggcttgaaattttgttagataaaaagttaatgtgagggaggtattaaataaaggagcagggaggaaaaagcggcagtggtgagacacctagatgagccttctcccttctgcatcagttcatcacccttcctacctacatcctcccccttcctacctacatcctcccccttcctacctacatcctcccccttggaagagctactttgctgcaaaggttgaaccaaaagattgtgaattcagggcaccagactaatttccagtagctgagaacagagagatacactgctttattggtgtatcagcaactctggctgaccgactttcacccttcagaccaaagatattgacttggctggatactctatagtaaacaccagttaacaagcacaaattaagaagcataccacaagaacttactaaaagaattttaatgcttaacctaaccatatcacttaaatttaactttcatatgaaggaagacctttttcattgaagattgtgcaaatattaacctacacagacacagtaacctctgttgacacattaaggcttttgaatcatgacattaaatttctatttcataatataccattttcaattttttaaatcagtgatcataaaataagtaaatattatgtagaaaaatacatttgactcaccctttgagtgatgtttaataaaattgttaaactaaacatgttagctttgtaaagatgcatcattataaaattttttttatttataaaaacagttctctggtaaaaactggaaaacctactagataaatttgaaaagggctgtaatgctctttttttgtatgacttttaatattgcccatatcagcctgtaatttactgagctataaattatgttaaacaaatataaacttatatttgaaaactgtcctgttcatggaagtttctactgattctgttgtaagtaaaagattttaaagttatcttaacattctggtaacactattcagattttggagtaaacctttctttgctgttggaacaggaagccatgcagtgtgtggaagagctgaatgcccagggcctactacatgtttttgtgagagtgggagtggagtccaccctggaaaggagccagatcaccagggatcacatgggccaactactctatcagctggtacagtcagaaaaactcagcaaacaggactttttcaaagggtcagtatcctcttcaagagtggtattcagttactaggctcttgggtaccagttaattttcaaagtacttacctctttaagtatttagttttttccatagatgaaaattgtatccactgtaatatgttgatatgatgcaattaatatattgatatgttggttgatgtgatggcattttatagattgtgctagggcataaaggttatcttttggttttctgaatattattgttagatctctatcatgttgtaagtaaggtaacagagaccccttagcctcagggaaactctgaggcctttagcagcccatttacatgtgatccccaaatgttctttgaggaaaaaagcttttctttgtgagaacaattctgaaaaattgtcttaaatttaaaaaccatattctttcaataaaccatggttattgtggctaggaagcacttgtgtgcccactctagcctcatggagaaggttatgtaacttggtgttcttaatgatttagtctatttcaggttggtttcattatgattcttgtcaatggatggtttgataaggtctgcctatctgcctgtcactggtggtgaatcctcatttgatcaggttctggtatatttgtgatataccatcatcacaagtacatggatcaggttccttgtggttcagccacaaaatcttacccaggcatagggtgtataaccaatgtttaaagtgaaaattgcattggtaaaaaattttgttttaggagccatgttgtatcaaatataaacacagagtcacacccagcactgacagatgcccactctctaagggaatagcaactaggatctcctaaggtctggacattggattaacatctgccatctcatcctcacctggacatatgcttattgaatcaaatggcagtaagaattctgtactacttgtaattttcctctttttttttttttttttgccaagctcatgttctcataaattaaatgcacatatgattaaatgccactgtatatttttccgtagtcatttcacatatggcaatccttttagaataaggtaaccattaaatgtcattgttggccaggtgcagtggctcacacctgtaatcccagcactttgggaggctgaggcgggtggatcacttgagatcaggagtctgaaaccagccacggccaacatgccaacatctactaaaaatacaaaaattagcccaacgtggtggcgtgagcctgcaatcccagctacttgcgaggctgaggcataagaatcgcttgaacccgggaggcagaggttgcagtgagccaaggttgcaccactgcactccgcctgtctcagtctctaaaaaacaaaaaagtcattgttgaatttattcgtttgactttgcaagcaatgacagcgttgtcttctaggtcctagaaaatttatacttgcccctaggaccattaaaaagttttcttgccaggcgtggtgactcacgcctgtaatcccagtattttgggaggccgaggtgggcagatcacgaggtcaggagttcgagaccagcctgaacaacgtggtgaaaccccgtctctactaaaaatatgaaaattaggctgggcaccgtagctcacacctgtaatcccagcactttgggaggccgaggcgggtggatcacaaggtcaggagatcgagaccatcctggctaacatggtgaaaccccgcctctactaaaaatacaaaaaattagccgggcgtggtggcacgcacctgtaatcccagctacccggagaccaaggcaagagaatctcttgaaccagggaggtggaggttgcagtgagctgaaattgcgccactgcactccattctgggcgacagagcaagactccctctcaaaaaagaagttttctttcaggctgggcatggtggctcacacctgtaatgctagcactttggaaggctgaggcaggaagattgcttgagcccaggagtttaagaccagcctgggcagcatggtgaaactccatctatactaaaaatataaaaattagctaggcatggtggtgtgcagctatagtcccagctacttgggaggttgaggcagaaggattgcacctgggaggtccagactgcagtaagccatgatcacaccactgcactccagcctaggtgacagaatgagaccacgtctggggaaaaaaaaaagttttctttcagcaataagctagattgctctgaattaaggccatttgaaccagttagtaagacactttggcaaaagttgctgtggttattggtttttaaggccaggatggtttcccagttttaaaagagaagcctccaattcagtccagtaactagccagtgcaaatggtaagagcaaataaaggtatgtacaccctcacaatcagattgaatatggtcctcccagcagacttgaaactataatttcctagaaataatactgttggagtgacgaggatatccatttataaatagttacttattacccagatattatgctacattcctcagaaaattctggaaatgataatggtaaattatcatttaccattttctgtctcttcaaactatactcggaagttgattcatatctataaagatgcccagaagcatagtctacctttattggctataattgaacttgtgagatactagcttagtctctcggatatctcagacatttgcatttctccctttgtgggattctctgaagaaaaaatatcataaccagacgtggctacagttttgttgttggtgttagaattgctgttgccggcaataattaccacactactaccttttatttagacataaaatgaggttaacacttctgtgtctcagcaattacttcatgtttcaccatacctgcttccgtctgcagctagaggcagtgcagtgactccaggcctaaccttcgatgcttagacctaaccagtcttggaccttagaccaagacatgtaaaagttgtactattttattctaaatggagaggcctgacaatttagtgccacctttttctaagagggaaatgtagggattgcttcatgtcagtgtccaccaagagctttcttgcaagcagatcagaatttcacaatcccttctaaagcctgagttataaatggttcatactgtctagagaggccatttcattggagccatgaagataccctgtcttttgcttctttattcttaacctacaaagatagtattgtccttccatagtattgtggaagagcctctgagatcagctgttttgggtgctgctactgcttagatgtcaacttctgaacagttggggaagcagtttctgcctagctcgccaagccaatgataactctgggaaggttagaaagcagaaagccagccaggcgcggtggctcacgcctgtaatcccagcactttgggaggccgaggcaggtggatcacgaggtcaggagatcgagaccatcctggctaacatggtgaaaccccgtctctgctaaaaatacaaaaattagctgggcatggtggcgcatgcctgtaatcccagctgctcgggaggctgagacaggagaattgcttgaaccagggagtcagaggttgcagtgagctgagattgtgccatggcactccagcctggcaacagagactccttctcaaaaaaaaaaagaaaagcagaaagcctccaggtatactggtccctggtgaggtagctactaatctgccatttctccctatagctctttagagtatgcactgctgcaaagtagtaaaatagacaaaagtttcaaataggctttatgaatatagcttttaggtcctttggaattttccttacaagatgttatatcaactgtgagcataatagttgctgtatgtgaaacatatctccgcaaagaaaacatcaagccatcgtcctgatattttcaggacttgaatctaaatactttatgaccctagttaggttggtaggtagataggtagaagcattattgtataggtacatgcacttcaaacagtgtgttgatagtctttttatatcatgatttcagaaaacttctttttaaaaactgtctagtaaatatagttgagtgcagtttgctgttagtcacagaactggaatgactttgaaagtataataaacaaatgaagaccaaggttgtaaaaattagagtggacaatagacacaaaatatgtaccctagaggaagattgatacattaatatttcactttgggagatgttttgttagagaggaaattcttatctcttccttgaatacttttctggaacctttattactgcttacggcaattctacattggtaaaagaccctatgtaggctggacacagtgattcattcctgtaatctcagctaccagggaggctaagatgggaggatggcttaaggccaggagttcaagaccagcctgggcaacatagcaagaccccatctgtaaaaaaaattaacaaaaaaattggctgtgcatggtggcacgtgccaataattacagctacttgggaggctgaggcaggaagattgcttgagcccgggagttcaagctgtagtgaactgcgagagcatcactgcaccccagcctgggcaacagagtgagatcctatctttaaaaataaaaaacactttgggaggccaaagtgggcaaattgcttgagcctaggagtttgagactagcctgggcaacatggtgaaaccctatctctaccaaaaaatacaaaaactctctgggcatggtggtgggtgcctatagctgcagctactcaggaagctgaggtaggaggattgccatactgatcttgtaaaatgacttgggaagtattttctccacttcaattttttggaagaatttgagaagaatttgttcttcttcaagtgtttggtagaattcagcagtgaagccatctagtcctgggcttttttttttttctctctgagatagggtcttgctctgtcacccaggttggagtgcagtggcttcatcgtggctcactgcaacctcaacctcctgggctcaagtgatcctcccatctcaacctctcaagtagctgggacagtaggtgcatgccactgtgctcagctgattttttattttttgtagagatggtgtctcactatgttgcccaggctggtcttgcactcctagacaaatgatccttccaccttggcctctcaaagtgctgggattacaggtttaaggcagtgcacctggccatgattcagtcttgatttgttgtatatatctatgagtttatctgtttttttctagattatccatttattgttcatagtagtttcttatgatcctttgtatttctgtggtatcagttgtaatatctcctctttcatttcttattttgagtcttctgtcttttctcctagtctagataagggtttcttgattttcttcatttttccaaaaatacaactccgagtatcattgatttttttctttcattttttaagtgtctatttcatttatttctgtttagatgtttgttatttccttccctgtgctaatttggggcttagtttgttcttctttttctagttccttgatgtgtaatgaatggtatattgtttgagatcttttttcttttttgatatagatgctcattgctatacatttccctcttaggagcacttttgctgcattctataagtgtcggtatgttgtgtttccattttcatttgtctcaagatattttttaaaaattcctttctaatttcttctgtgacctattggttgtttaggcagatgttgtttaatattcacatatttggatattttccaaggtttctcctgttaactgagttcaagttttattgcattgtgatccaaaaagatacttgatatgatttcagtcctcttaaatttgttaagtcttgttttgtggtctaacatatgatctattggggagaatgttttatttgcactttagaagaatatgtattctgctgctgtttaatggaatgttctgtatatttttgtttggtttaaagtataattcaagcccaatgtttccttactgattttctgtctagatgagttgttcattgtctaaagaagggtattgaggtcccctgctcttgctgtattgtagtctgtctttcccttcagataatcaattgccctatgtttttaggtactccaatttgaggtgcatatgtatttataactgttatatcctcttagtaaatggattcctttatcattacataatgacctttgtctctttttatagtttttgacttaatgtcctttttgtctcatataagtatagctacccctgccctcttttgatttctattttcatgaaatatctttttccttctcttccttttcagtctatgaatgtccttagtagtaaagtgaatctcttataagcagcatatggttggatctcatttttcatttatttattttttagattttgtgagagtcacactctctcacccaggctggagtgcagtggcgcaatcaaggctcactgcaacctctaccttctggactcaagcaatcctcctgggtagttgggaccacagccatgcatcatgatgcctggctaattttttttatttttttatagagacagattctccctacaatgcccaggctggtctccaacaactaggctcaattgatcctcctgccttgacctcttcaagtgttgggattacaggcatgagccattgcgcctggccggatcttattttttaatctatttagccactcagtcttttgattggaaaatttaatccatttacatgtgacataattattgatagataaggacttgctactgccattttgtaatttgttttctggttatttttgacaataccactttcaattgtggtagcattattttgcttttttgaaagatttcttatcagaactttactgcgttaaaatttttaaatatttttcttccaacactatgttgaataggagtggtgagagagggcatccctgtcttgtgcccgttttcaaagggaatgcttccagtttttgcccattcagtatgatattggctgtgggtttgtcatagatagctcttattatgttgaaatacgtcccatcaatacctaatttattgagagtttttagcatgaagcgttgttgaattttgtcaaaggctttttctgcatctattgatataatcatgtggtttttgtctttggctctgtttatatgctggattacatttattgatttcctattcaacatagtgttggaagttctggccagggcaattaggcaggagaaggaaataaagggtattcagttaggaaaagggaagttaaattgtccctgtttgcagacgacatgattgtatatctagaaaacccctttgtctcagcccaaaatctccttaagctgataagcaacttcagcaaagtctcaggatacaaaatcaatgtacaaaaatcacaagcatttcttatacaccaacaacagacagagagccaaatcatgagtgaactcccattcacaattgcttcaaaaagaataaaatacctaggaatccaacttacaagggacttgaaggacctcttcaaggagaactacaaaccactgctcaaggaaataaaagaggatacaaacaaatggaagaacattccatgctcatgggtaggaagaatcaatatcgtgaaaatggccatactgcccaaggtaatttacagattcagtgccatccccatcaagctaccaatgactttcttcacagaattggaaaaaactactttaaagttcatatggaaccaaaaaagagcccgcatcgccaagtcaatcctaagccaaaagaacaaagctggaggcatcacactacctgacttcaaactatactacaaggctacagtaaccaaaacagcatggtactggtaccaaaacagagatatagatcaatggaacagaacagagccctcagaaataacgccgcatatctacaactatctgatctttgacaaacctgagaaaaacaagcaatggggaaaggattccctatttaataaatggtgctgggaaaactggctagccatatgtagaaagctgaaactggatcccttccttacaccttatacaaaaatcaattcaagatggattaaagacttaaacgttagacctaaaaccataaaaaccctagaagaaaacctaggcattaccattcaggacataggcacgggcaaggacttcatgtctaaaacatcaaaagcaatggcaacaaaagacaaaattgacaaatgggatctaattaaactaaagagcttctgcacagcaaaagaaactaccatcagagtgaacaggcaacctacaaaatgggagaaaattttcgcaacctactcatctgacaaaggggctaatatccagaatctacaatgaactcaaacaaatttacaagaaaaaaacaaacaaccccatcaaaaagtgggtgaaggacatgaacagacacttctcaaaagaagacatttatgcagccaaaaaacacatgaaaaaatgctcatcatcactggccatcagagaaatgcaaatcaaaaccacaatgagataccatctcacaccagttagaatggcaatcattaaaaagtcaggaaacaacaggtgctggagaggatgtggagaaataagaacacttttacactgttggtgggactgtaaactagttcaaccattgtggaagtcagtgtggcgattcctcagggatctagaactggaaataccatttgacccagccatcccattactgggtatatacctaaaggactatgaatcatgctgctgtaaagacacatgcacacgtatgtttattgcggcattattcacaatagcaaagacttggaaccaacccaaatgtccaacaatgatagactggattaagaaaatgtggcacatatacaccatggaatactatgcagccataaaaaatgatgagttcatgtcctttgtagggacatggatgaaattggaaatcatcattctcagtaaactatcgcaagaacaaaaaaccaaacaccgcatattctcactcataggtgggaattgaacaatgagatcacatggacacaggaaggagaatatcacactctggggactgttgtggggtcgggggaggggggagggatagcatcgggagatatacctaatgctagatgacgagttagtgggtgcagcacaccagcatggctcatgtatacatatgtaactaacctgcacaatgtgcacatgtaccctaaaacttaaagtataaaaaaaaaaaagaaaaagtaagatgattggaaggaaaacaataaaatgatccttattttctggtaacataaaaaaaaaaaaagaaaaatgcaaaggcaaagaatcgatcaggttggcagaagctgttccctggcttatgggcaggagggagctggtgaggctttggaaattctattgctaacactaacacgggagatctttctggcctttctggttttggcaatggctctttttctcctgccttctaaggtactacaggaaaaaatatttcctctacctccatcccacattgcccaggaacattttaaagattgaaggctttctcaaaaaaaaaaaaaaaaaaaatttaatatttttcttttaatcatgtatccctttcttcaattaaaattttacacaaaaacccagtaaataaaatgaagtggagcttttgtagttgaaatgggcggagggatatctgcagtctcatctatgtagaccttaccaaagttcagtccagtggctgtggttttttccttccacccaaagaaaagcctgacagtccaatgactgtgatggtcactacatgccaagaggcaagggtatgatgtagctctgtttcattttttcagcttttagaaaataacgtgtggtgcaaagcattaatataggctatgtagtagtgcaaagacataaagacagttattacctaggtgcttcagcacactcaagatttttcttttagaatcatgcaacaggatttaagaactgtaaacctgaaaaaaaaataagcttcttacaggcttgttctatggaaatcctatgttcagccaaaaaagttttttgttagcagtatagatttgaccactgattgtgttctgtggactgtcccatgatgaactgactgatcaaggcataaaaaaccaaagcaagaatatgggtatattttatttgtaatgagataaaatatatgagataaaaatagcagcaggtacactgctgaaagaccagcatggctacagttgtctcttgggcccattaaacagcttaatttatgctgctagcccacagagcatgagttggcaggatcaggtggttaacctagaaatcctggagtccagctagattatatttcatcagtggtacattaactgaacccaaagtatgcacataatgagagaacctgcaattatttgacatctatttgccatagcacagacaccgtcctcggcatcaaataattgcaagctgtgaggtcagaaagttggaattaaggattcatgaagcccagagttagataatatggctgagctgcaaactgttttgaagtggcagcttcagaatggtgaccctgcctatggtggtagctctttttaagtgaaaagttttagtgagatgtaggcctctgaaaaaagggtggcatactttggctagaacctggaactgcagtggaaaagcacacgttttacaattgtagagatctgaaagggcatgcatacaattaccacctgctcttagctcttcaattcattcctccctttccttatgacttgcaattatgtgtatgtctcctgtagttaaattcatttgcttttgtactttattatatattgtatgtggaaataattaacaaagtcttgagttgtttgtttatacttccaaatgaacagctatgatttttagcctacataagagtgctggtattttatatttgattttcctaagttttatatttaattcccatttgcttgacattgagaaatatttataattcatagcacaaaagcctgaaaccattagcttttctgtagagatagaacagttcgtaacatgtaataatgatgatagtgttagtaatgttgccagactcttttatatccatccagttttttccccattgtaagattcctcaaggacacagatttttgtgttttacagtaagtgtttagtcagtgcttttgactgactcagagaatatgatattcaactgtggtgaattctttatagtgcaggattaaatggataatttttcccctagaacttcacaggactgtccttcttttcatcatttaaggctttcaaatgtcacctttatatggaggtattttctgacctccttcttgtacatagttcatgttcttcagagtattagccctatttgcaagtatgcttttgtctgttctagtctttttcccccacgctaacataatctctttgagaatggtaatgtatttaccagtcactttgtggctagactgtacctaacatagcaggtgattaatatgtatttgttgactgattttttatctctttatttaattttaacttttgaattacatttgcatgtgatttttaccccctgttccttttcagtttttcagaaactttggaattggcagatgacatggccattgatattccccatatttggttgtaccttgctgaactggtgacccccatgttaaaagaaggtggaatctccatgagagaacttaccatgtaagttatacttgtttctcttgatatatatcaggtagaactgactaataactcacttgctagctctctatcatagtactgtcccattatcgcctttggagactcatgaatgcaggctgtgactctttaagacttctgatttcagtgtaaaaatgttaccttatgctaggtctacacctgagatattctggggatatgatagccctgtggtctgttgagggtagtggcgatgatagattggctccagaatcgtgtaactggaagatgactgcttctagaagcttaatgttcatctggcttttgtgtctatcattgcagtagtgctgtaagtagttatattttcccattgtaacttgtcagactgcattaccccatagtacatgctcatgattataataaaaggatgattataataaaacaaactgagatctcaagtattcctacatttggatgtgagtggggaatggatgctacgttatatagaccggtggttcccaaactctgttcttcgaaacactagtgtttccacaaaagttgtttatatagtcaaactttgcacatggtcatgtcccttttctttgagattaacaaaacatacttagcatattaaagtttatgacagtcctatagtaaagcaataaataaaaactagttagctttgtttaattcagcattgcctcacttagagtatagatatcctatggaacacagtttggtaaatgctgatttagactgttacaaaattggcccctttgctgtttcatccataatttcatctataaagaaaagcttcctttcttaaaaatactttatatatggccagacgcaatagcttacacctgtaatcccagcactttgggaggccgaggcaggcggatcacaaggtcaggaaatcaaaaccatcctggccaacatggtgaaaccctgtctctactaaaatgcaaaaattatctgggcatggtgttacgtgcctgtaatcccagctacttgggaagctgaggcaggagaatcgcttgaaccagggaattggagattgcagtgagccaagattgcgccactgcactccagcctggcgacagagtgagactctgtctcaaaaaaaaaaaaaaaaaaaaaactttataaaagcatcacaactccctgttacctaaggtgcttctcattttagcttgaagcagaacttacataaacaaacagattaccacatctgatctttgtgttgcttctgtcactgaagtggttaaagaaaaaggtaaaaaccaagaactcacatgtaccttttcaggaacttctcctgaaaatgacttagagcatgtcctggagctttggcttgcccagtattatgtaggttgcacagtatctggtttttggtcacacattgtttgcctcttgttctagaagaaaggatttctttagagatacttaatcactgctcctatcttttacagagaatttagcaaacctttacttcctgttggaagagctggggtcttgctatctgaaatattgcacctactatgcaaacaaatggtgagtgttacactgagtgtcagactcaacagtattattaggaagggcagtgatcttgatcttgggttatctgtgaatagcttaggtctcagggtgcaagtaattaagaatgaggtctctgcttcaacccagtttctttctgaggtgcatttgtccttctgtttgctaatatcttggggcagaattatcaaatctcgactagatttggtataattctaaagaatctcaagtcatgttttatttgtagttgattttttcttcctttgaaacaaaatggatatatcatttatatgttttaatagatttcaacgaaaagctccatagagctggaggctgtcagtctatggcaggctgtcagtctataaagtgggaacagataaatctaaaccaataatttcaaaagagtgaaagtgctttgttagaagtctaagaggtttggggaagtgttgtggcatcacaaagggaataaaatgtctaggatgagagggatgagagatgtcaaaacaaaacagaactcagaaatgaagattctggagtgatttctgacttacttacgcctgactcaaagatattggatgatagattttaatgtttaaagtcagtgtttcattcctccctctgatacagaagtccttctgtatcccatttgtgtggtagttattcataaacagatgtactaaatatcctggtctctagttctgttgactatttgttaatactactctttgcttaatggcactaaaatttttactgaaccctagtttttatgtccaaaatttcctcctctccgacctacttgactttagtccttatttaaaactcacattctggccgggcgcagtgattcacacctgtaatcccagcactttgggaggccaaggtgggcagatcacgaggttaagagatcgagaccatcctggccaacatggtgaaaccctgtctctactaaaaatacaaaaattagccaggcatggtggcacgcacctgtagtcccagctacttaggaggctgaggcaggagaatagcttgaacccgggaggcagaggttgcagttagccgagatcatgccactgcgctccagcctggcaacagagcaagactctgtctcaaaaaaaaaaaaaaaaaaaaaaaaaaagaaagactcacattctggctggcacagtggctcacgcctgtaatcccagcactttgggaggccgaggcgggtggatcacttgaggtcaggagttggagaccagtctggccaacatggcaaaatcccatctctactaaaaatacaaaaattagccaggcatggtgacaggcacctgtaatcccagctacttgggaggctgaggcaggagaatcgcttgaatctgggaggtggaggttggagtgagccaagattgtgccactgcatttcaacctgagctacagagagagactctgtctcaaaaattaataataataactaaaaactcacattcttactaactttgatgtgtagaaacagcacaaccctacttccaaataaaactaaattctcatatagtataagctttggagccagatggccgagttcaaattctggttcaactatattttcagctatgccttggacaagttactctatgaagtaattaatacatacctctcagatgacagcaacagcctcaaacctggcattttccgttgtcactgtaactttcttcaggtagaggacttgtacctcttcacttttttctacctgacaacagctcttctttattctctctcttgggctcaaccttgtgcttcttgcccttgaaacacttctcattcctggttcaggagcaacaactgctttaagcctccttgtatcaggcagcatggctgtgatctattatgaagagggattctagtgaggcttcttgaatggctttaatagcagatacatacagagctatctaggaaaagacacagtgtggaatttataaactctgtgtattggactttttttgatgtttataaatcccaaataaccagctgtagctccccagattagtcacctcataaatcaattatttaatcttaagcagctgtacttcaattattcaccattgtatttatgtgcattcagacatcttagtttgaaagtcacaagtcttaagagattaactttttatcagtgaggaaaagtttgttttcgagactggtcttgctgtgtgtgttgcctgggccagactcatactcctgggtgaaagctgtcttcccacctcagcctccctagtagctaggactatacaggtgtgcaccaccatgccctgctggaaacgttttgatttttcagctttttggggtttgcactgtttgacttcaagcaaatctttttttttttttttttttctgtttcttcttccactgtgaaagtaaatggattggatttatctctattttagagccataagaaagtgggagccttatggagggaggctgacctcagctggaaggactttttaccagaaggagaagatgtacataattttcttttggagcaggtaagaacaaggcttatgttttgctgtttgatagtagttgatctatttcatagaggaagtgaaggtaatttccttcgtattccagtcgttaaaattgcatcaaaataggaatcttggtaaagatgtccttttaagttcatgcttttaaagccactccaactgtgtggtcatcagatgattgatatttaaaaaaagaaaatgtaaaagacttagcaacctatagaaaaacaagctacagcaagcagaaatgaagttaacaaataaagcagggtgacagggccaaagctgtctcctgatttctgggtctgatggcaggccagaagcagccagaagttattctgtggggaatggagaccattaatacccttataaggtagaagattagagacaagcttatagcttgaaactacacaggtaaataagtgcaaggaagtagacacagtcttatacccagaaccttagctatcctgcctactgactggtaactagatccagaaatctacaaaacagaagaccccatgatcagtataatctggtcctataggaggatttgtgggctgttaggttgaggtaaccataaaacaaattagatcaagaaaagtaacagaaagaaaacaaaactctctcaaaacgttactgaaaatcaaaatcctaaaactcatgaggaaaactaaagctaagacagccaacaaaatcaggaataaggagaaaaaaaatcaccataggtaaaaagagaacaagaatgcaatctgaaaatgactttaaaataagtattttgttctggataaagatattatattaggttgctacagacattagctttctttttggttgtagtctggaacactgaagagcattcttgccacagcaataagaacctgcatgaagcataacttctgatgtgttactggacttagaagaggtggaagtaatttccttcaaagggacaaaaagaattaatgagggggaaaagccagagatgaaacctgaactgtgaatagtaattacatgtgaagggcatattgcccaaaggacacatagcccagtgggaagatactattacaaatgctgtcagatgtcatggaaaaagttgacttagtcccagttcagtattaccttggctcccagaagcagcaaatcaaaatgctctttggagaaacatcctcaacttaggtccccttattttctacaaatccaaattatttaaatatatgagttgacacttggtgttcatttaacatacaattaaagaagtaaagataaaagtaaacagacaataagtagtagatttagaccccatggacttgaggtaatggaattatcattcagagtataaaataacactatagtaaaagaaagaatcacaaaaatgagcaaacaagagactagtcaaaatggttaaagagatttgaaaagaaaagaaaaggttgggtgcagtggctcatgcctataatcctagcactttgggaggctgaagcaagagaatctcttgaagccaggagttggagatcagcctgaacaacatagtgagacctgtctctactaaaaaaaaatagctaggtgtattggtgcacctgtagtcgtaagctactcgagagactgaggcagaaggatcactagagcgtgggagtttaaggctgcagtgagatacgatcacaccactgcactccaacctgagagacaaagtgagagcctatcaaaaataaaaaataaaataaataaacaaaagccacacacacacacaccaaaatctgtaggtagctatctaagatatgttaatatgttaggagatttggaggaaagaatgagagaacatctaacctatctaattggagtcccagaaggaaaattagcctaaatggagaagaggcaatatttgaagagacagtggctgagacttctagaagtgataaaatatacaaatctataatgaaagcccatatatgcaatacaggataattatattttagtgaaactgcataataccaaagacagatgaaagattttaaagaagctgggaagaagaagcacattacttacctgcctccccctcaaaaaaaaaatacacaaaaaattagactttgcagtagcaaccatgaaagccagaagatggtagaataatctcagagtgctgagaaacgagcagtaaatgtagaattccctgtgcagctgaactaacctttaagaattagggcaatgcatactgagaaacttaacaacatacttctaaatacccatgggtcaaagaagaaatcaaacatgatagtaaaaaacatttttaactgaatgaaaacaaaaccacaacatatcatcgatatttagaaaagaagaaaggtcaataacctcagcttcaaccttaaagaattagaaaaataaggccagacacaatggctcatgcctataatcccaacactttgggaggccaaggcaggaagattgcttgagcccaggagcttgagagaccagcccaggcaacagagcaagaccctatcaccaaaaaaaaaaaaaaaagaaattagaacaataagaacaaatgaagctccaagcaaatagaataaaggaaataataaacattatatcagaaatcaatgaaatagaaaaatttttagagaaagaccagtgaaatcaaaagctggttctccaggaggtggaggttgcagtgagccaagattgcaccattgcactccagcctggacaaaagggcgagactccgtctcaaaaaaaaaaaaaaaaaaaaaaaaaaagctggttctttgagaagataaaagtgataaacctctagccagattgatcgtgaaaaaaagtttgaaaagaaggtacatattactaatatctggaatgaaagcggtaacatcagcacagattctatacataaaagtgggtgaggaaattttatgaataatctttatgtcaataaatacatcagccaggcgtggtggctcatgcctataattccagcactttgagaggccgaggcgggcggatcacgaggtcaggagttcgagaccagcctggccaacatggtgaatccccgtctctactaaaaatacaaaaattagccaggtgtggtagcacacgcctgtaatcccagctactcaggaggctgaggcaggaaaattgcttgaacccaggaggcagaggttgcaatgagccaagatcacattattgcactccagctctgggtgacagagcaagactccatattgggaaaataataataataataatgtagggtttatcctagaaatgtaaggtgggtttaatatttgaaaactgatgtatacataatagggaagatggtgaagtatacataatagagaagtatacataatagagaagtatacataatagggaagatggtgaagtatacataatagggaagtatacataatagggaagatggtgaagtatacataatagggaagtatacataatagggaaggtggtgaagtatacataacagaagtatacataatagggaagatggtgatgtatacataatagggaagatggtgatgtatacataatagagaagtatacgtaatagggaagatggtgaggttccaggattcaatccctccactgacacaactattgaactggcaagatctgttagagccaactgttttagaactgtggagtctcgttaaatacatgcattatcaacaccaggggattgcataatgaaaaaagagtctgataaatttcagtgaatttgggaattttgcatagaacttaccagtacccagcccagtggcagaccaccaggaaactggcatcacaccatttctggtgcagcttgctggtgccaggttgaacaataaggacttcattttccaaggattggggttgtgtcttttaattgacttttagttgactgagaggccagtgctggggctggctgttatttcaactctttcatgctgaagtatcttttagggctgtgactatcaaaagtatttaagcagtagtgttaacgggatctctggagtgtcgatttttttggccagaaacctctgtggccatggcacctttgcccgagttcttttcctgtgtccaggaagaatgaggtacgcaaacaaatgaagggtgaagaagagttttatttagtgttagaacagctcagaggagtgggtagctcctctctagtaggcaggttgtcccatggagtgttcagctctctgtagagaggaggctctggagaggatagctcctctccacaggcaggtcgtttggacatttctgcaggtctctgaagctctcagaggagagggtacctcctctctcctggcaggtcatctctgcagctctcagcagagaaggcattcttctctgcagctggtcctccaatcgtctctctaccctctttgtcctctgcccatctgctaccctgttctggctgagtccagggcttttatacctcagaggggaagaaatgcatgccaattggtccataggcagccatggttgggcctggaagaggcaccatgagcccctactccactctgctggactggcatcccagcccccagccttcaggtcctccctggcctgagggtggggccttactggggaccctgcccccttccacccaggactctgtctgcctcctgctgccattcatggccctggggcttggtcccaaccccactccaagatcagagagcaggcaactctgagcctgcagggacagggggtctttcctgggacacccgagggtgctgactgcagagacgcccaggtgctgcatgcctaggagggcagccacagctgcaccccagagctcccaccccaccaactcagaagaggcagggctcccccttttcccgtcccctgcctgctttgtggaacgggaggcccaggtctgcagccgcaggtcaggcagctgcgacagcacccaggaggggagatcctgcctgctccctcaagaaaggctcgaatccacagctgcagtttgggtgggagggcagggctcctgcctgctccaaagagcaggaggcttgggtccgcagctatggtttgggtggctgcagtagcacaggcagcttccatcccaactcagaaggggcagggctcccaccggctccatgcagtgtacggccccagctgcacctccctgctgcagccaatagtatctctctctctgtctctctctctttctttctgtctccagtctctctgtctcctctcctctcccctctctcctctttcctccttctccactccctctccctgagtcctctttttttgttaatttaacttttattttaaggtcaggggtacatgtgcaggtttgttctataggtaaacttgtgtcatgggggtttgctttacagattattttgtcacccaggtattaagcctagtacctattagttatttttcctgatcttctcccttctcccaacctctgccctctgataggttcgtgtgtgttgttcccctctatgtgtccatgtattgtcaccatttagctcccacctataagtgagaacacgcagtatttggttttttgttcctgcattagttcgctaaggatcacttggcctgggaggtcaaggctgcagtgagccatgatagtgccattgcactgcaacccgggcaaaagagcaagaccctgtctaaataaataaataaataaataaataaataaatatgagacttcagtttaaaagaaaaaaaaagcaatcggaggtcaaggctgcagtgagccttgatagtgccactgcactgtaacctgagcgaaagagcaagaccctgtctaaataaataaatatgagacttcagtttaaaagaaaaaaaaggcaaaataatatatatataataaaatgaatatataaaaatgtttatagtttgaaaaatgaggttgaaaaatacttggcctgtatcttgacttacagtttgcttaaacagcttatggccttcatgttgtgcttttttgcatatattggagcatcatggattggatgtatagttaaccaatactaaatcagaaaaattgtaatattgagccatgtttctaaaatcttatggagctgggtgcagtggtgcacactgtagtctcagctgctcgggaggctgaggcagaaggatctttgagccccagagttcaagtccaacttggcaacatagtgagaccccaagtcaaaaataaataaataataaaaccttattgggaaatataatttagagatgctacgtaagtggtagaaacggaacaatcagatgacagaactcaagactgtggttttcactttgtggattggggatagggtataggaccataccagagtattcaagagtattagagaaaaccttatgtgagtaatccttaatattttcatctttatggtttttgtataatgaagccacataaagcaaggcatacctatgtacttcatttctttagtcctttgaaaattatgaataattttgattatagattttttttttctttttgagacaggatctcgccctattgccaggctgcagagcagtggcacaatgacaattcactgcagcctcaacctcccatgctcaagcaatcctcccatctcagcctcctgagtagctgggaccacaggcgcatgccacaacacctggctaattttggtatttgtgttggtagagacggggttttgccatgttgcccaggctggtctcaaactcctgaactcatacactcctcctgccttggcctcccaaagtgctgggattactggtgtgagccactgcgcccagcctgattatagattttttaaaactatgtatctaagtgctaaacaattatagcatcatttctcacacctatattcgaaatggccacaacttaacaaagccaaaactatctagttttgatagctgctgagtaccaatactaatattaaaccataggttgcagaaagagagtgaaattgtacccttttctagggctcctatcctgccttaaagagctatgttgcagctaaggggaagattgaagctcaagattatttgcgtgtaaccatagcctagagataattatagggggttattaccttcttttttaagatacacggtatgagaagttggaaaaatattcagaaggataatggactgacagtttttcaaaactataatacgaacaggttgggcgtggtgagtcatgcctgtaatcccgtctttgggaggccaaggagggcggattgcttgagctcaggagttcaagaccagcctgggcagcatggcaagaccccttctctactaaaaacacaaaaaaatagccaagtgtggtggtgtgggtctggagtcccagctactcaggaggctgaggtgggaggattgcttgagcccgtgatgtggaagttgcagtaagccaaactactccagcctggatgacagagcaagaccctgtctcaaaaaaaaaaaaaaaaaaaaactacaaacataaaatagcctctgctgatcattttgattccatgtaaaatagaagacgtaacctatgactttgttcttctctcaggatgacaataacatagaattatattaatatattaatatgttccaccttttatgtttcagaagttggacttcatagagtctgacagtccctgttcctctgaagcactttcaaagaaagaactgtctgccgaagagctgtataagcgactcgagaaactcattattgaggacaaagcgaatgatgaacagatctttgactgggtagaggtataaagactatgtcaccttccctgatacctctacaggaaagattcttgtgggatccccttaattcgcttacctatcagttcacttcatgaatttttattatttatttttttttatttatttatttttttatttatttatttttttttttttattgatcattcttgggtgtttctcgcagagggggatttggcagggtcacaggacaatagtggagggaaggtcagcagataaacaagtgaacaaaggtctctggttttcctaggcagaggaccctgcggccttccgcagtgtttgtgtccctgggtacttaagattagggagtggtgatgactcttaacgagcatgctgccttcaagcatctgtttaacaaagcacatcttgcaccgcccttaatccatttaaccctgagtggacacagcacgtgtttcagagagcacagggttggggttaaggtcacagatcaacaggatcccaaggcagaagaatttttcttagtacagaacaaaatgaaaagtctcccatatctacttctttctacacagacccggcaaccatccgatttctcaattttttccccacccttcccgcctttctattccacaaaaccgccattgtcatcatggcccatccccaatgagccgctgggcacacctcccagacggggtggtggccgggcagaggggctcctcacttcccagtaggggcggccgggcagaagcgcccctcacctcctggatagggcggcggccgggcgnnnnnnnnnnnnnnnnnnnnnnnnnnnnnnnnnnnnnnnnnnnnnnnnnnnnnnnnnnnnnnnnnnnnnnnnnnnnnnnnnnnnnnnnnnnnnnnnnnnnnnnnnnnnnnnnnnnnnnnnnnnnnnnnnnnnnnnnnnnnnnnnnnnnnnnnnnnnnnnnnnnnnnnnnnnnnnnnnnnnnnnnnnnnnnnnnnnnnnnnnnnnnnnnnnnnnnnnnnnnnnnnnnnnnnnnnnnnnnnnnnnnnnnnnnnnnnnnnnnnnnnnnnnnnnnnnnnnnnnnnnnnnnnnnnnnnnnnnnnnnnnnnnnnnnnnnnnnnnnnnnnnnnnnnnnnnnnnnnnnnnnnnnnnnnnnnnnnnnnnnnnnnnnnnnnnnnnnnnnnnnnnnnnnnnnnnnnnnnnnnnnnnnnnnnnnnnnnnnnnnnnnnnnnnnnnnnnnnnnnnnnnnnnnnnnnnnnnnnnnnnnnnnnnnnnnnnnnnnnnnnnnnnnnnnnnnnnnnnnnnnnnnnnnnnnnnnnnnnnnnnnnnnnnnnnnnnnnnnnnnnnnnnnnnnnnnnnnnnnnnnnnnnnnnnnnnnnnnnnnnnnnnnnnnnnnnnnnnnnnnnnnnnnnnnnnnnnnnnnnnnnnnnnnnnnnnnnnnnnnnnnnnnnnnnnnnnnnnnnnnnnnnnnnnnnnnnnnnnnnnnnnnnnnnnnnnnnnnnnnnnnnnnnnnnnnnnnnnnnnnnnnnnnnnnnnnnnnnnnnnnnnnnnnnnnnnnnnnnnnnnnnnnnnnnnnnnnnnnnnnnnnnnnnnnnnnnnnnnnnnnnnnnnnnnnnnnnnnnnnnnnnnnnnnnnnnnnnnnnnnnnnnnnnnnnnnnnnnnnnnnnnnnnnnnnnnnnnnnnnnnnnnnnnnnnnnnnnnnnnnnnnnnnnnnnnnnnnnnnnnnnnnnnnnnnnnnnnnnnnnnnnnnnnnnnnnnnnnnnnnnnnnnnnnnnnnnnnnnnnnnnnnnnnnnnnnnnnnnnnnnnnnnnnnnnnnnnnnnnnnnnnnnnnnnnnnnnnnnnnnnnnnnnnnnnnnnnnnnnnnnnnnnnnnnnnnnnnnnnnnnnnnnnnnnnnnnnnnnnnnnnnnnnnnnnnnnnnnnnnnnnnnnnnnnnnnnnnnnnnnnnnnnnnnnnnnnnnnnnnnnnnnnnnnnnnnnnnnnnnnnnnnnnnnnnnnnnnnnnnnnnnnnnnnnnnnnnnnnnnnnnnnnnnnnnnnnnnnnnnnnnnnnnnnnnnnnnnnnnnnnnnnnnnnnnnnnnnnnnnnnnnnnnnnnnnnnnnnnnnnnnnnnnnnnnnnnnnnnnnnnnnnnnnnnnnnnnnnnnnnnnnnnnnnnnnnnnnnnnnnnnnnnnnnnnnnnnnnnnnnnnnnnnnnnnnnnnnnnnnnnnnnnnnnnnnnnnnnnnnnnnnnnnnnnnnnnnnnnnnnnnnnnnnnnnnnnnnnnnnnnnnnnnnnnnnnnnnnnnnnnnnnnnnnnnnnnnnnnnnnnnnnnnnnnnnnnnnnnnnnnnnnnnnnnnnnnnnnnnnnnnnnnnnnnnnnnnnnnnnnnnnnnnnnnnnnnnnnnnnnnnnnnnnnnnnnnnnnnnnnnnnnnnnnnnnnnnnnnnnnnnnnnnnnnnnnnnnnnnnnnnnnnnnnnnnnnnnnnnnnnnnnnnnnnnnnnnnnnnnnnnnnnnnnnnnnnnnnnnnnnnnnnnnnnnnnnnnnnnnnnnnnnnnnnnnnnnnnnnnnnnnnnnnnnnnnnnnnnnnnnnnnnnnnnnnnnnnnnnnnnnnnnnnnnnnnnnnnnnnnnnnnnnnnnnnnnnnnnnnnnnnnnnnnnnnnnnnnnnnnnnnnnnnnnnnnnnnnnnnnnnnnnnnnnnnnnnnnnnnnnnnnnnnnnnnnnnnnnnnnnnnnnnnnnnnnnnnnnnnnnnnnnnnnnnnnnnnnnnnnnnnnnnnnnnnnnnnnnnnnnnnnnnnnnnnnnnnnnnnnnnnnnnnnnnnnnnnnnnnnnnnnnnnnnnnnnnnnnnnnnnnnnnnnnnnnnnnnnnnnnnnnnnnnnnnnnnnnnnnnnnnnnnnnnnnnnnnnnnnnnnnnnnnnnnnnnnnnnnnnnnnnnnnnnnnnnnnnnnnnnnnnnnnnnnnnnnnnnnnnnnnnnnnnnnnnnnnnnnnnnnnnnnnnnnnnnnnnnnnnnnnnnnnnnnnnnnnnnnnnnnnnnnnnnnnnnnnnnnnnnnnnnnnnnnnnnnnnnnnnnnnnnnnnnnnnnnnnnnnnnnnnnnnnnnnnnnnnnnnnnnnnnnnnnnnnnnnnnnnnnnnnnnnnnnnnnnnnnnnnnnnnnnnnnnnnnnnnnnnnnnnnnnnnnnnnnnnnnnnnnnnnnnnnnnnnnnnnnnnnnnnnnnnnnnnnnnnnnnnnnnnnnnnnnnnnnnnnnnnnnnnnnnnnnnnnnnnnnnnnnnnnnnnnnnnnnnnnnnnnnnnnnnnnnnnnnnnnnnnnnnnnnnnnnnnnnnnnnnnnnnnnnnnnnnnnnnnnnnnnnnnnnnnnnnnnnnnnnnnnnnnnnnnnnnnnnnnnnnnnnnnnnnnnnnnnnnnnnnnnnnnnnnnnnnnnnnnnnnnnnnnnnnnnnnnnnnnnnnnnnnnnnnnnnnnnnnnnnnnnnnnnnnnnnnnnnnnnnnnnnnnnnnnnnnnnnnnnnnnnnnnnnnnnnnnnnnnnnnnnnnnnnnnnnnnnnnnnnnnnnnnnnnnnnnnnnnnnnnnnnnnnnnnnnnnnnnnnnnnnnnnnaggttcaagggattctcttgcctcagcctctgcctgccaccatacccagctgatttttgtgtttttagtagagacacggtttcaccatgttggccagattggtctcgaactcctgacctcaggtgatccatcctcttcagcctcccaaagtgctgggattacaggcatgagccactgcacctggcctgttttttgttttctcaagacaaggtctcgctctgtcacccatgctggagtgcagtggtgcagtcattgcttactgcagcctcaaacccttgggatcaagcagtcctcccaccttagtctcccaggtagctgggaacacaggcatgtgccaccatacccagctttttttttttttttttttttttaagagatagggtcttactatattgcccagactggtctcaactcctagcctcaagtgatcctcctgtctcggcctcccaaagtgttgggattacaggcatgagcctctgtgcctggctgagcaaggtatctttaattgttttatttctttttgacttcaggctaatctagacgaaatccagatgagttcacctacattccttagagctttaatgactgctgtttgtaaagcagctattataggtaagtaacatttctgaaggcagctcataacatctgaaatccccattatgtcaactactaagtatacagtttgattttacattgttttcaaaacttctcctatgtagctcacttttctgtgcactgtcctttctgtctgtgatgcctggttgtctcaagcgtggagacaaatagctgctccgcctacagagaacccagatctaaccagctaccacatgccttgcatgctccttgggttgtttttcactacgttgcgtgtagctttttctttatcttttcacttctaacattcagggccgcctcctccttccaataatgaattataatgaacaggttgaatattcttaatctaattatcagtatagggttattctcatcaaaaaagtcatgttatataagtacatacatgaagaaaaaaatatcaacagtttgtcctgttctttgttgactttatttgatatgataagacaattttattggcttatgaattgttaatattgataggattagggtcagtagaaatcccaaatattccaagctgtatacaatgtttaacattattcaatgaagacatctctttagtttcagatagaaattcatacttctgtcactgaagcgagaaaaaaaaattcatcagtgcaaaggtgtctcagaatttcaagtctgtctctattttgaagatggctttctgccacttaatatagcttcagaattgtaatttaagatttgcaatgaatttattttcaatgttctttaatgagataaataacaaagctaagtagaaagtcttcatgaaatttttaaaaatcattttcagtatccatagaaccatcataagactttcatgttttaaaattcgagttgggaagtccaaaagctgtttggtttttgttttcttgagatggtgggggtcactgtgttgcccaggctggacctgaactcctgggcttaagcggatcctatcgcctcagcctcttgagtaactggaattacaggcatgagccacgatggccagattttaaaagcaaaatctgcttttaaaaacaaaattgtgtcttagtgataacttacagataatataaacccgtatgtgtctttgtactgaggatgcttttcatttctcagcccctttttatcattcctttccctcaaaaggcctagattaggtatgttatctgccactgccacagttagtttttatcctagtaataacaaaatggttccaattattttagccttctgaaaagatttgtattaagtgtcactttaatttccttttctaatgttgcttttttatgttgctttttttaaatactcacttgaaattcctactccatgtttcatttatttttgattgacaaattataattgtatatgtttatggggtacaatgtgatgttttgatatacatgtccaatgtggaatgattgaatcaaattaattaacatatctatcacctcacttacctttttttatggtaagacatttgattaattttgcttttgtagtttgtcataaaaccacagtcactgtttcattacaattaaagataattgggtacgctactcctgagggaaaccagcattcaaaatgcatcccctccatagtttttattatttgtgagagaatgtctcattaataatttcagagcattttggatttcaaaatatttgccttagaccttcttgcctcctcttctcttgtagagccatatgggtcctttgtactcagaaaattgaaaatgagccaggttgcagtggctcatgcctgtaatcccagcattttgggaggccaaggcagaaggattgcttgagcccaagagttcaagaccagcttgggcaatatagcgagaccctgtctctattatttaaaatctaaaatagaagaagaagaagaagaagaaaggccaggagcagtggctcatgcctgtaatcccagcagtttgggaggctgaggcgggtggatcgcctgaggtcaggagttcgagacaagtctgaccaacatggtgaaaccctgtctctgctaaaaatacacaaaaaaattagtcaggcctgggagcaggcgcctgtagtcccaacaacttgggaggctgagacaggagaatagcttgaacctgggagacggaggttgcagtgagcttagattgtgccactgcactccagcctgggcaatagagtgaggctctgtctcaaaaaaagaaaaaagaaagaaaattaaagataattctatgttaactccttaaatgtaattcctagttcttctatcacctttagccgactcttctaccttcagagtggacactgctgttatcaagcagagagtgccgatcttactcaagtacctagactcagatacagagaaggaactgcaagcactttatgcactacaagcatcgatagtaaaacttgatcaacctgccagtaagtttatctcatgttacagttaatctaaccaatgagtgagatttatccaagccaggacttagagatgatttagggttcgaacaaaggacaataaaagaatcactaataacacaaactcatataactaactttaataaatttgaatttggccgggtgcagtggcttgcgcctataatcccagcactttgggaggccacggcaggcagatcacttgaggtcaagagttcaagaccagcctggccaacatggtgaaaccctatccctactaaaaatacagaaatggctgagcacggtggctcacacctgtaatcccagcactttgggaggccgaggcagatggatcatgaggtcaggagatcgagaccatcctggctaacacagtgaaaccctgtctctactaaaaatacaaaaaattagctgggtgtggtggcgggcacctgtaatcccagctacttgggaggctgaggcaggagaatcgcttgaacccaggaggcggaggttacagtgatccaagagcatgccactgcactccagcctggcgacagagcgagactctatctcaaaaaaaaaaaaaatacaaaaatacaaaaattggctaggtgtggtggcatgtgcctgtagtcccagctacagctactcagaaagctgaagcacgagaatcacttgaacctgggaggcggagtttgcactaagccaagatggcgccactgcactccggcctggacaacagagcaagactctgtccaaaaaaaaaaaaatgaatttgttatatgtttgtatgaaaatatcacaacaagaaaactatttagattaggttatttcatccccattccagggcaggcctaataaaactttccacagtgatggtagtatatatccataccattgagtatggtaatcatgagccacatgtggcaattctatacttaaatatgtctgttgtgacttaggaactgaattattgactttaaatttaaataaccatgtttgactaatagcttccatattggacaacacaggtctagggcatgaaaatggttaatgatgttgaggatgatactctagaatctttagacacccaacaaagaccctaagtgtagtgtatttaccatgctatatttactaaggagtttcagaatagtttttagttaagggttatgattaattcttggctaatgaaacaaagtaacctgtacacttaagtcttagtgatacttggtgttaactaatgatttttattacatcttgaaaattcagttggtatttgttaaagcgggcagtacatagctattagagagagcactcaagtagttctttggtacttccttattttcgcttttgtaaaattccttctttcctagtcctgaatcgctcttggagataaaggaaaagatgaaagcaaattatccttatagtgtaactgaagagacaatctaccatgaatcagataatttgataatattagcttaactaatataattacaaagataagtctttttaaaaaaaggccgaggcatgcagatcacccgaggtcaggagtttgagaccagcctggccaacatggtgaaaccccgtctctactaaaactacaaaattagctgggcgtggtggcgcatgcctgtaatcccagctacttgggaggctgaggcaggagaatcacttgaacccatgaggcggtggttgcaatgagccgagatcatgccactgcactccagcctgggcaaaaagagcaaaactccatttaaaaaaaaaaaagttaatacgactcatgataaacctaatattgattagcatttattgtttattccactgcctccctccattaatataaatgatcggagagctgactataataactataagctaataacttattatatatgataactataattctcagttttactatgagagtaaaaccgagaattaaaatcacacggatagtttggacgtttaaaacagtaaataacaggtgtagtttcactggataaaatccagatgagatagcttttactcatgttttccatgtgaatgatcacctctttttcttttttgagacggactctcgctctgtcacccaggctggagtgcagtgatgcaatctcagctcactgcaagctccgcctgccgggttcacgccattctcctgtctcagcctccctagtagctgagactacaggcacccgccaccatgcccggctaattttttgtatgtttagtagagacggggcttcactgtgttagccaggatggtctcgatctcctgacctcgtgatccgcctgtctcggcctcccaaagtgctaggattaaaggtgtgagccaccgcgcccggccacctcttcatttttaaaacaacattacaaggaataaaaagcatatcctgcctttctcccttcccccaaattttgtaaaaataatacagtaaacttgcagcgcagaaaatagtcaaaagaaagtaaacaactactcgtatttaaattttatagggtttagattgagataaacatgatatgaaacagcttcactggtatcagaagatagttcagattgggccgggcacggtggctcacgcctgtaatcccagcactnnnnnnnnnnnnnnnnnnnncgtgtacccagctcaacggtataaaccctccgcatgccccctatcttacaatacccctatgacagcgtcaccatggtaatgctccactaaagccagaggggacgaaataccttatctacctggaaacgccggcacctcgagaccacgagggattacttgtgactaagcggataaaatgggacagccctaggtattccggtcacctaggttcaccctcccacgttatacacgatacaaggttgaactatcacagtaattctaaaaattagccattacagaagagcaccaatattgtcacaggtacctctaaggctatatccatcttcgagcccttactagagcatctttagaaaagttcgaagtaacttacatgaaagtacagccgcagatgtgcaatcaactgatgaagcaagtgtcaggacttactgtgacaccgacgagcggctgaaaggagttattgacctgagctttgagaaggctattgatcgcgcccggccacctcttcatttttaaaacaacattacaaggaataaaaagcatatcctgcctttctcccttcccccaaattttgtaaaaataatacagtaaacttgcagcgcagaaaatagtaaaaagaaagtaaaaaactactcgtatttaaattttatagggtttagattgagataaacatgatatgaaacagcttcactggtatcagaagatagttcagattgggccgggcacggtggctcacgcctgtaatcccagcactttgggaggccaagatgagcggatcacctgaggtcaggagttcgagaccagcctggccaacatggtgaaatcccttctctacttaaaatacaaaaattagctgactgtggtggccggcgcctgtaatcccaggtacttgggaggctgaggcaggaaaattgcttcaacccaggcaggcgcctgtaatcccaggtacttgagaggctgaggcaggaaaaattgcttaaacccaggcaggcgcctataatcccaggtacttaggaggctgaggcaggaaaattgcttaaacccaggaggtagaggttgcagtgagccaagatcgcaccactgcactccagcctggggacagaacaagattgtctctcaaaaaaaaaaaaaaaaaaaaaaaaaccagaaaaaaagttcaaattgtacaaaataataggaataaaaaagaatttagactgcttcaatctttttttcctcttctttaaacaagttgttgggctgtttatactgtcaagagcaagtatggtgaattgtcattattgcttttttctgggggaattaatgcacatttattcagtcattcattattttgaaatatattcttttcctcataactacagtgtcccaaagcttatagtttattttcacctccttgcagatttgctgcggatgttttttgattgtctatatgacgaggaggtgatctccgaggatgccttctacaaatgggagagcagcaaggaccctgcagagcagaatgggaagggcgtggctctgaaatctgtcacggcattcttcacgtggctgcgggaagcagaagaggagtctgaggataactaaaacttcaaatacacaaaatgaaacaaaagaaacaatttaagtatttttttaaaaagtttcacgtcttcgccaatcacagtgcagcaaggccaattctcgcagaaacccccacgtgtgcacgagtgggagaggggaaagagaaaaaaaggtgatcatggaggaaaaaggtactggataaaagtaaacttcaaaccttagggcgggagcactaaaaccaaaatacatgtattatttatagaaaatattttctgttttaatcttttctttttaaacaaggactcatacttaaaaaaatgtttagcaaaaaaaaaaaaagttgagaacttttaatttattttaaggactgcaaatgccagtgtaattttttaatttgcagtttctgtaaacaacttgtataatagaaaagcagagaaataaatttccctccccttcaagatgcacctcatgtttgttttaaggtatagcatttagtccagatttgagaaagtttggggtgaacaaggtaagaaagatttttttttttttggcatcaaatctttctgcctgcctctcagcttgcttcagaaaatttaaaaaatcacaatagtaatcaaaacatacataacattgaaacagaaggaaatgctgtggaccacagaactccaagaattgtttaaaaaaaaaaaagtgctaccctgagaaaagtactcttaatactcttgaaatctttagagcaactttaaggcttgtaaatacatagaacaaatatttaaaaaaacaaaaagaaattgactcagtactatttcttttcactttgaaaatataaagaacaaaataaagacaaacattgcaagtttaaaagaaagtaaagtgacttctcctttggacagctgctgcatgtgtgcccattcctgggggtgctgtctggctatttattgtctaattcaaatcactcctgaggggagagagataaaacgagagagagtgagagagtgtgtgtatgtgcgtgtatgcgcacgtatgtgcatgcacatgtatgtatgtatatgtctctactcactgaaaaggcaagctactttgtgggtaaggagggcacttgtgcttgggtgggaatgccccactgggagtccagtgaaacttgtttccaacactaactaaaaatgcattcaggacagtaggcctcaagggcagtcctttagataactaagttttccactctgtgtatcaggactcaggacaataattcactttgagactgccactaccactgattttaaaatcttccatcaattgcctgcaatgcttaagaaacccaaagatgtcctctaaagaatgaataaaaccaaaagctatattatgcttttacaaaagtgggggtgggatttttataaaagtgggggtggggtttaaaatcaagccaataccatgtatgcaaatcacattgtctgccaactccaacctcattcaagccattctggtgagtataaagctgactgtgggcctctgcttgggcctctgcttctcctacagatattggagtgctgtgctttctaattttcccaccctttcatgaagtcgcagtctctacagatggttttccatttcagttgtttgtgggccatcaacctacaaaatgtatttatgaagaaagccagactactcccagataaatagtctttttcttttgtatctggataacaagagatttctgctggcttccatctctgaagaaataccacattaagagacttggcaagacttgtgaaacacaagaacaaaattttctatagcaataaaatgtttctctgaagtgtagttgaacacaatacaagatcccactacataagcccacagaggccatttttcagtggtggaatgctgtatgccactggtccccaatgcacaacctagatccctcacatgtgcagttcacaatgggttcgcgctcctgtgagaatctaatgccaccactgatctgacaggaggcggagctcaggtggaaatgcttgctcacacaccactcaccttctgttgtgcagcccagtttctaacaggccatggaccagtacgtgtccttggcccaggggctggggacccctgctgtatgctgcttttgttttgttttgagacagggtgttgctctgtcacccaggttggagtgcagtggcttgatcatggctcactgtagcctcaaactcctgggctcaagcgatcctcctgcctcaccctccccagtagctgggactacaggcacacaccaccacagaatactattgttgaaggaccaagtcctgaaagtcttttgaagggtatgcgacagcatcagctgtaaaagatggggcctgaaaagctgttttggagcctgaccacaggctttgcctgggatccctcaattgggagaagcagcctggttctatgatcaactgagtaaacaacctccagaatcaaagtgcagaggattatgatcaaggaatcgtctctgagtgatagaagtttttagaaggtattgacagcactcaagaggttgagggaggggagtttaggggaatacaggatggtaactgcctcttgagaatcagtagctgttttttgcaggggtctgaccagggagggatttcaggtagtagagatggcctagttatcagtattttacatattaacaagtgtaaggaatggaggaaagagagaaatatttttgaaagaacaattaaagggttgaaaaatatcttaagatataaacatctctagtacaatgacagaaataatgtttgaaatcttacctataacatgaagtatgttgaagagactacaaagtaagctttgagtatcttgttgctgtggacacggaatgtgtgctaggattagaagttgcctaatgacaaaatatgagcaaagtaagataattgccccctactaatatccactgaactgcaaaacagtgtcaagattattaccctctctagtctttttactggaaaatagggtttggcaatttttgttttaatataataggtgacattgccaacattgatatgccagcactcctttgagctgtagcaaaagctccttcaccgatttcaaatttgggagcaggtccaatgcctttttttttttttttttttttgagatggagtctggctctgttgcccaggctggagtgcagtggcgtgatctctactcactgcaaactccgcctcccaggttcaagcagttctgcctcagcctcccgagtagctgggattataggaagcgccaccacgcccggctaatttttttgtattttaagtagagatggggtttcaccatatttgttttgccaggctggtcttgaactcccaactccaggtgaaccgcccacctcggcctcccaaagtgctgggattacaggcatgagccaccgcacctggcccaatacctcttttagtgcatttattaaggtgcttatacctattttctaaccagtcaacttatggctattcagtaaatgaacattttttcatttctaacaaaggaaaatgatactaattttcaaaatgaacttattttgggttcttgtgtaggccaataagctagcccataactgcatcatgagcttgttttgttcaaccaatatttaactcaacatctactgtgcactaagtggagataggataacagtgaccacagtaggctctgctttcatggatctcatattcttcatgaaaacagaaagctagaggtcgttaacatgctgcatcagcatcgcatcccactaagaagtatctgctccttattactttggcagatctttgtttgttttttctttatatttcaaaattcattctaggctgtttgcaacaattaaatccaaagatagctttaaaaccactctccaaacaagttattttggagtttttgacatactatcttgtttcaaatggctctttttaagtcaatagaattctaagttggttggggaaagatcctaggctactgtatctaattctgttttcatcactcaagttttattatttaaaaaaaaaatagaggaatccagtttttcaatttcaactatgtcattagcatgtacttccatattctccattttgtagggagtaacattttacattactttttgtttgctttttcttttcttgagacagtcttgatctgtcgcccaggcgggagttcagtggtgtgatcttggctcactgcagcctccacctcccaggttcaagtgattctcctgcctcagcctcccgagtagctgggattacaggctcaggccaggtagggagggatatgctacatgcccactggcataaaatatcccatatgtccctcaaaaggaaaaatgatcatctgttagtttggggacttaaaaaaaaaacctgacatcactgtgtattaccaaatcatgagatgatttatacattaagctacagagaatcatatgccaaatgttattcagttaaagttttattttgaaataatttcagacttacagaaaagttgcagattttacagaaagttctatatacccctcatccagttccctttataataacatcttatattgccataggacatttgtcaaaactaagaaaccagctttggtatgttgcttgtaactaaacttaagagtatttagattttcaccaatgtcccttttctggtccaagatgcagtccatgatactacattgcatctaaggaatcatttccttagtgtcctctggactttgacagttttttggtctttttcatgactttgacaattttgaggagtaataatgggacattttgtagaatgtctgtcaatttgtatttgtctggtgtttttctcatgattaaagtggggttatgtattttggataaaaataactgtatattgtaatcccagctctttgggagaccaaggcaggaggattacttgaagctaggagtttgagaccagcctgggcaatataggaagacccccccatctctacaaaaatacttaaaaattagccaggcatggtgatgcacacctgtagtcccagctgctcaggaagctaaggcaggagaatcacttgagcccaggagatcaaggctgcagtgagctatgatcatgccactgcatttcagcttgggcagcagaatgagaccctgtctctaaaaaataaaaacacaaataccatataaatgaagttctcttctcatatatcagcaggtacaagatactcacatgataactttatttggctaagttggtgtttgccaggtttctctatagttacttttctttcccccctttcttactctagtctatatgaaagccagtcactaaatccaacccacacttgggaagagagatgggagtaggagagaattaagctttacttcctttctagagtgggaagcgtctacttaaattatttggaattttcccacaaggaagatgtctctcttctctatttgtttgtttagtcactcatatgtatttatatgtgtgtatgtataaatgtacacacatgggtatgtatatatcagtatgggctcatgtatatttcatactttgaattataacccaatagtacatgattttgttgttcacattgttccagctttagccattaggggctctttcaagttggcttatgtgtcccttgacattccctgatacttttgtttttagagcacgtactttctgccatcacaagatgccacagacatatcttgtattttccctgcctcagtcctagaatcagccatttctacaagaatccctggtttcttctaggagaatgggatttagaaaccaagcttttactcactgggtttgcatgttgctattggggcatctcagcctcttggtctgccaacattttaaacttcattttcttgccaggcgagtaagctgctttcacatggagcactatgaccattagaaaacatagttctgggctgggcgcagtggctcacccctgtaatcccagcactttgggaggccacaataggcggatcatgaggtcaggagatcgagaccatcctggccaacatgccgaaacaccgtctctactaaaaatacaaaaattactgtgcatggtagcgcgtgcctgtaatcccagctacttgggaggctgaggcaggagaatcgcttgaaccagggagtcgaaggtttcagtgagccaagatcacgccacagcactccagcctgacgacagagcaagactctgtctcaaaaaaaaaaaaagaaaacatagttctggtgtgtgtgtgtgtgtgtgtattactttgggccaagcgcagtggctcacacctgtaatcctagcactttgggaggccgaggtgggtagatgacttgaggtcaggagtttgagaccagcttgtgcaacatggtaaaaccccatctctactaaaaacatacaaaattagccaggtgtggtggtgggcacctgtagtcccagatactcgggagactgaggcaggagaactgcttgaccccgggaggcagaggttgcaatgagccaagatcccaccattgccctccagcctgggtaacagcaagactgtctaaaatataataataataaaataaaacactctggtacccaaaagactcaagcctatagatacttcattcattttctgctcatcttacataggaaaaagtagagggccaggtactgtggctcacggctataatcccagcacttcgggaggccaaggtggccagatcacttgaggccaggagttcaagaccagtctggccaacatggcaagactctctctctactaaaaaatacaaaaattagttgggcctggtggcgcatgcctgtaatcccagctactcagaaggttgaggcacgagaatcacttgaacctgggaggcggaggttgcagtgaaccaagatagggtcactgcactccagcctgggtgacagagtgagactctctcaaataaataaatcaataaatattgaactgtttctctctttccccattatgattatttgttttaatttcccttagctagtaatatttagagtctactaaggtaccaatacagagcagtgttaaaatgttaactcagttaaacaataataatggaaatcgcgaaataatgaaaagttaactgatgataaaagcgctgcgtatcaaaacttgagataaacctaaagtaagcccaagagttcgaggttacagtgagctttgattgtgccactgcactccagcctgggtgacaagagttaagaccctgtctcttaaagcaaaaaagctgagtaatacttttaggtaaatgtaaagtctttaaatacatttgtttagaaaccataccagtttaaagtaaatgaattagggtatcagaagaaccaactgggggcagggggatgccacctaagtgaatatcaagagtttactcttccttctataggaagaagttgtgtgctgagaggaaggaggtatagactagaattgggagatctgtgctctaatgctaacattgctgttcacggaatatttgaccacctgcttggtatgggccttcctctcttctctagaaagggcttactcttgccaaccatatgagcacatccagaatcactttaaatactgcctaccaagcttaacaaagacaaaaggttttggtaataataggatattaccagcttttcaatgaagtaaaaatatcaagaatttctgaaatttcaagtcaccatgagttgaacttgtactatcagtattccttttcaatccttctgtcatatttacctcttattggtaaatacatgtcctctgacctgaagtcctgggaaactatctttgccaaatttcaaaaagccaccctgccatagcttcttcctacattgtagaataaatagtgctcaacactggctgtgtgttagaagtacctggaaagcttttaaaaatacaaatcctggagccccacctcagactaattatttcaggatctctggggatgagacctgggcatctctctctctctctctctcattttttaaatttaaattccttaggtgatcataatatgacccagggttgagacgacactgaaatggtgaaaataacctgattcagctaacaatatagataacaatttatattttcaggtatttcagaaatatattttaactgcaagatgttggacaaacaaatggacttacatatggcacatactttgaaaatacagtgttaggagagcatataatggggaccctgtatacactgggggattagggaatgttgcccttaggagtagaattttaaacaaaaatgtgaagaatcaaatagttaaggggtctgttgaaatagaggagatcttgtgtgcaaagtccatggttgggggaacgcatggtgtatttgagaatgaagaaagggtgacagtatggcgagagttcattctcacatgcaaaagtcaaatctgaacgtgcccagtgacaaattaatccagacaaactttttctggacaaatagagggaaagaaccttttttttttttttttttttttttttttttttgacagagtcttgctctatcacccaggctggagtgcgatggcacaatctcagctcattgcaacctccacctcccggattcaagcgattctcttgcctcagcctcccaagtagctgggactacaggcatgcaccatcacacccggctagtttttgtatttttagtagagacggggttttaccatttgaccaggctagtctcgagctcctgacctcaggtgatccacctgccttggccttccatagtgctgagattacggcatgagccactgcgcccagccatggaaagaacttttgaaagctgccttatactttcacttagcagaattcactagagatgaactttagttggtttttttaatagttactcagcaaaaagaataacgatgctttcaatcatttccaattcgcaattagccacacagcatgttagaataactgtaggctctttggagtaactagttatatctaacctcagggttagtcaaagtatgggccttggactagcagcatcaacatcacctgtgagcttcttagaatgcaaattcacaggccccagcctactaaaaccgaatctgaagagatggaagatcccaagaaatcgctataagcgcttcagatgatttttaggcacactgaagtttaagaaccactgcctaggagtatttcacatctctgccagagtatagtcctcttcaaaaagctaacacaaaacaagttgtatgctgcttttagaacctttcggcttgtactttcgcatctacaacacagaaacaataagcccttcctgatttccttagtaaactaatagtaaattaatttcctaggcaatgcaggatggcatctaattggtcttcatactaggcttctgacatgtaaggtggtgctgcttccttttaccaggtagggaactgagtaacacagaagtcatgtacctagcaagtgtcagaagcaagactggcacttggttttctgggaggcagtattgtccgaaaaataactctcaccaccaagagttttcttttggggaaaatgacgtagtggatgtagtttggaatattggcattggaaaaataggagcattagtatagccctgctggggttgctgaaacctcggcttccatttatttatttatttttttatgagacagggtctcactgtcgcccaggcagtagcttagtgctgtgatctcggctcattgcaacctgtctcctgggctcaagggagcctccagagtagctgggactgtggctaattcttgtattttttgtagagatgggttttcaccatgttgcccaggctggttttgaacacctgagctcaagccatcaacccaccttagcctcccaaagtgctggggtcgcaggcatgagttactgcgcccggccagttgcctcatctataaaacaaaagtaacatccacttcatggggttgtcttgaggaattaaaggagatcggataaagtgcccagcattctgcctgaaatacctagggcccttcctgtctgcgtccagtgttctttttctgccacactcttactaccttagtcataatcagttacatacagttaggctatgccattttcagaactgtaggagattatagcttacctatccacatttctttctttttttttttttttgagacggagtctcactctgtcacccaggctggggtgcagtggtgtgatcttggctcagtgcagcctccacctccggagttcaagcgattctcctgcctcagcctcccaagtagctgggactacaggcatgcgccaccacgcctggctaatttttttgtattttcagtagagatggggtttcatcatgttggccaggctggtctcgaactcctgacctcaggtgatctgcccgcctcagcctcccaaagtgctgggattacaggcgtgagccaccgtgcccagcccacatttatttaatattctattgatcaaatttttaaaattgttttactttccctagaaaatactatgaagtctttttttttttttttttttttttttttttttgagacggagtctcgctctgttgcccaggctggaattcagtggcaccatctcggctcactgcaagctccgcctcccaggttcacgccattctcccgcctcagccttccgagtagctgggactacagacgcccgccaccatacccggctaatttttttgtatttttagtagagatggggtttcacctatcatgttagccaggatggtctcaatcttctgacctcgtgatctgcccgccttggcctcccaaagtgctgggattacaggcgtgaaccaccgtgcccggcaatactatgaagtcttaagtgtctatccctactgctaacagacctgggaatagaggc

SEQ ID NO: 938 - DNA, 5863 bp, Homo sapiens
caatcccacagagtattgatgaggaaactgaagtttggagcgatcacatcattttcccaaggtaacacaagtggcaagacagccgggaacccctaccccatccccttattcagcacatgaaataaacaaggggcatccaaatcttgcggcaacgcccccgggacatgcatcgtcccctggactctctcaaaccccttatccctctggacagaatgcaggtccaaccacgctggtataccctcaaacccctcagacaatgaattcacaacctcaaacccgttctccgtttttccagaggcctcaaatacagcctcctagagctaccatcccgaacagcagtccttccattcgtcctggtgcacagacacccactgcagtgtaccaggctaatcagcacatcatgatggttaaccatctgcccatgccgtacccagtgccccaggggcctcagtactgtataccacagtaccgtcatagtggccctccttatgttgggcccccccaacaatatccagttcaaccaccggggccaggtcctttttatcctggaccaggacctggggacttccccaatgcttatggaacgcctttttacccaagtcagccggtgtatcagtcagcacctatcatagtgcctacgcagcaacagccgcctccagccaagagagagaaaaaaactataagaattcgggatccaaaccagggaggtaaagacataacagaggagattatgtctggaggtggcagcagaaatcctactccacccataggaagacccacgtccacacctactcctcctcagcagctgcccagccaggtccccgagcacagccctgtggtttatgggactgtggagagcgctcatcttgctgccagcacccctgtcactgcagctagcgaccagaagcaagaggagaagccaaaaccagatccagtgttaaagtctccttccccagtccttaggctagtcctcagtggagagaagaaagaacaagaaggccagacatctgaaactactgcaatagtatccatagcagagcttcctctgcctccatcacctaccactgtttcttctgttgctcgaagtacaattgcagcccccacctcttctgctcttagtagccaaccaatattcaccactgctatagatgacagatgtgaactctcatccccaagagaagacacaattcctatacccagcctcacatcttgcacagaaacatcagaccctttaccaacaaatgaaaatgatgatgatatatgcaagaaaccctgtagtgtagcacctaatgatattccactggtttctagtactaacctaattaatgaaataaatggagttagcgaaaaattatcagccacggagagcattgtggaaatagtaaaacaggaagtattgccattgactcttgaattggagattctcgaaaatcccccagaagaaatgaaactggagtgtatcccagctcccatcaccccttccacagttccttcctttcctccaactcctccaactcctccagcttctcctcctcacactccagtcattgttcctgctgctgccactactgttagttctccgagtgctgccatcacagtccagagagtcctagaggaggacgagagcataagaacttgccttagtgaagatgcaaaagagattcagaacaaaatagaggtagaagcagatgggcaaacagaagagattttggattctcaaaacttaaattcaagaaggagccctgtcccagctcaaatagctataactgtaccaaagacatggaagaaaccaaaagatcggacccgaaccactgaagagatgttagaggcagaattggagcttaaagctgaagaggagctttccattgacaaagtacttgaatctgaacaagataaaatgagccaggggtttcatcctgaaagagacccctctgacctaaaaaaagtgaaagctgtggaagaaaatggagaagaagctgagccagtacgtaatggtgctgagagtgtttctgagggtgaaggaatagatgctaattcaggctccacagatagttctggtgatggggttacatttccatttaaaccagaatcctggaagcctactgatactgaaggtaagaagcagtatgacagggagtttctgctggacttccagttcatgcctgcctgtatacaaaaaccagagggcctgcctcctatcagtgatgtggttcttgacaagatcaaccaacccaaattgccaatgcgaactctggatcctcgaattttgcctcgaggaccagactttacaccagcctttgctgattttggaaggcagacacctggtggaagaggcgtacctttgttgaatgttgggtcacgaagatctcaacctggccaaagaagagaacccagaaagatcatcacagtttctgtaaaagaagatgtacacctgaaaaaggcagaaaatgcctggaagccaagccaaaaacgagacagccaagccgatgatcccgaaaacattaaaacccaggagctttttagaaaagttcgaagtatcttaaataaattgacaccacagatgttcaatcaactgatgaagcaagtgtcaggacttactgttgacacagaggagcggctgaaaggagttattgacctggtctttgagaaggctattgatgaacccagtttctctgtggcttacgcaaacatgtgtcgatgtctagtaacgctgaaagtacccatggcagacaagcctggtaacacagtgaatttccggaagctgctactgaaccgttgccagaaggagtttgaaaaagataaagcagatgatgatgtctttgagaagaagcagaaagaacttgaggctgccagtgctccagaggagaggacaaggcttcatgatgaactggaagaagccaaggacaaagcccggcggagatccattggcaacatcaagtttattggagaactctttaaactcaaaatgctgactgaagccatcatgcatgactgtgtggtgaagctgctaaagaaccatgatgaagaatccctggagtgcctgtgtcgcctgctcaccaccattggcaaagacttggactttgaaaaagcaaagccacgtatggaccagtactttaatcagatggagaaaattgtgaaagaaagaaaaacctcatctaggattcggttcatgcttcaagatgttatagacctaaggctgtgcaattgggtatctcgaagagcagatcaagggcctaaaactatcgaacagattcacaaagaggctaaaatagaagaacaagaagagcaaaggaaggtccagcaactcatgaccaaagagaagagaagaccaggtgtccagagagtggacgaaggtgggtggaacactgtacaaggggccaagaacagtcgggtactggacccctcaaaattcctaaaaatcactaagcctacaattgatgaaaaaattcagctggtacctaaagcacagctaggcagctggggaaaaggcagcagtggtggagcaaaggcaagtgagactgatgccttacggtcaagtgcttccagtttaaacagattctctgccctgcaacctccagcaccctcagggtccacgccatccacgcctgtagagtttgattcccgaaggaccttaactagtcgtggaagtatgggcagggagaagaatgacaagccccttccatctgcaacagctcggccaaatactttcatgaggggtggcagcagtaaagacctgctagacaatcagtctcaagaagagcagcggagagagatgctggagaccgtgaagcagctcacaggaggtgtggatgtggagaggaacagcactgaggctgagcgaaataaaacaagggagtcagcaaaaccagaaatttcagcaatgtcagctcatgacaaggctgcattatcagaagaggaactggagaggaagtcgaaatctatcattgatgaatttctacacattaatgattttaaggaagccatgcagtgtgtggaagagctgaatgcccagggcctactacatgtttttgtgagagtgggagtggagtccaccctggaaaggagccagatcaccagggatcacatgggccaactactctatcagctggtacagtcagaaaaactcagcaaacaggactttttcaaaggtttttcagaaactttggaattggcagatgacatggccattgatattccccatatttggttgtaccttgctgaactggtgacccccatgttaaaagaaggtggaatctccatgagagaacttaccatagaatttagcaaacctttacttcctgttggaagagctggggtcttgctatctgaaatattgcacctactatgcaaacaaatgagccataagaaagtgggagccttatggagggaggctgacctcagctggaaggactttttaccagaaggagaagatgtacataattttcttttggagcagaagttggacttcatagagtctgacagtccctgttcctctgaagcactttcaaagaaagaactgtctgccgaagagctgtataagcgactcgagaaactcattattgaggacaaagcgaatgatgaacagatctttgactgggtagaggctaatctagacgaaatccagatgagttcacctacattccttagagctttaatgactgctgtttgtaaagcagctattatagccgactcttctaccttcagagtggacactgctgttatcaagcagagagtgccgatcttactcaagtacctagactcagatacagagaaggaactgcaagcactttatgcactacaagcatcgatagtaaaacttgatcaacctgccaatttgctgcggatgttttttgattgtctatatgacgaggaggtgatctccgaggatgccttctacaaatgggagagcagcaaggaccctgcagagcagaatgggaagggcgtggctctgaaatctgtcacggcattcttcacgtggctgcgggaagcagaagaggagtctgaggataactaaaacttcaaatacacaaaatgaaacaaaagaaacaatttaagtatttttttaaaaagtttcacgtcttcgccaatcacagtgcagcaaggccaattctcgcagaaacccccacgtgtgcacgagtgggagaggggaaagagaaaaaaaggtgatcatggaggaaaaaggtactggataaaagtaaacttcaaaccttagggcgggagcactaaaaccaaaatacatgtattatttatagaaaatattttctgttttaatcttttctttttaaacaaggactcatacttaaaaaaatgtttagcaaaaaaaaaaaaagttgagaacttttaatttattttaaggactgcaaatgccagtgtaattttttaatttgcagtttctgtaaacaacttgtataatagaaaagcagagaaataaatttccctccccttcaagatgcacctcatgtttgttttaaggtatagcatttagtccagatttgagaaagtttggggtgaacaaggtaagaaagatttttttttttttggcatcaaatctttctgcctgcctctcagcttgcttcagaaaatttaaaaaatcacaatagtaatcaaaacatacataacattgaaacagaaggaaatgctgtggaccacagaactccaagaattgtttaaaaaaaaaaaagtgctaccctgagaaaagtactcttaatactcttgaaatctttagagcaactttaaggcttgtaaatacatagaacaaatatttaaaaaaacaaaaagaaattgactcagtactatttcttttcactttgaaaatataaagaacaaaataaagacaaacattgcaagtttaaaagaaagtaaa

SEQ ID NO: 939 - protein, 1579 aa, Homo sapiens
MNSQPQTRSPFFQRPQIQPPRATIPNSSPSIRPGAQTPTAVYQANQHIMMVNHLPMPYPVPQGPQYCIPQYRHSGPPYVGPPQQYPVQPPGPGPFYPGPGPGDFPNAYGTPFYPSQPVYQSAPIIVPTQQQPPPAKREKKTIRIRDPNQGGKDITEEIMSGGGSRNPTPPIGRPTSTPTPPQQLPSQVPEHSPVVYGTVESAHLAASTPVTAASDQKQEEKPKPDPVLKSPSPVLRLVLSGEKKEQEGQTSETTAIVSIAELPLPPSPTTVSSVARSTIAAPTSSALSSQPIFTTAIDDRCELSSPREDTIPIPSLTSCTETSDPLPTNENDDDICKKPCSVAPNDIPLVSSTNLINEINGVSEKLSATESIVEIVKQEVLPLTLELEINPPEEMKLECIPAPITPSTVPSFPPTPPTPPDPHTPVIVPAAATTVSSPSAAITVQRVLEEDESIRTCLSEDAKEIQNKIEVEADGQTEEILDSQNLNSRRSPVPAQIAITVPKTWKKPKDRTRTTEEMLEAELELKAEEELSIDKVLESEQDKMSQGFHPERDPSDLKKVKAVEENGEEAEPVRNGAESVSEGEGIDANSGSTDSSGDGVTFPFKPESWKPTDTEGKKQYDREFLLDFQFMPACIQKPEGLPPISDVVLDKINQPKLPMRTLDPRILPRGPDFTPAFADFGRQTPGGRGVPLLNVGSRRSQPGQRREPRKIITVSVKEDVHLKKAENAWKPSQKRDSQADDPENIKTQELFRKVRSILNKLTPQMFNQLMKQVSGLTVDTEERLKGVIDLVFEKAIDEPSFSVAYANMCRCLVTLKVPMADKPGNTVNFRKLLLNRCQKEFEKDKADDDVFEKKQKELEAASAPEERTRLHDELEEAKDKARRRSIGNIKFIGELFKLKMLTEAIMHDCVVKLLKNHDEESLECLCRLLTTIGKDLDFEKAKPRMDQYFNQMEKIVKERKTSSRIRFMLQDVIDLRLCNWVSRRADQGPKTIEQIHKEAKIEEQEEQRKVQQLMTKEKRRPGVQRVDEGGWNTVQGAKNSRVLDPSKFLKITKPTIDEKIQLVPKAQLGSWGKGSSGGAKASETDALRSSASSLNRFSALQPPAPSGSTPSTPVEFDSRRTLTSRGSMGREKNDKPLPSATARPNTFMRGGSSKDLLDNQSQEEQRREMLETVKQLTGGVDVERNSTEAERNKTRESAKPEISAMSAHDKAALSEEELERKSKSIIDEFLHINDFKEAMQCVEELNAQGLLHVFVRVGVESTLERSQITRDHMGQLLYQLVQSEKLSKQDFFKGFSETLELADDMAIDIPHIWLYLAELVTPMLKEGGISMRELTIEFSKPLLPVGRAGVLLSEILHLLCKQMSHKKVGALWREADLSWKDFLPEGEDVHNFLLEQKLDFIESDSPCSSEALSKKELSAEELYKRLEKLIIEDKANDEQIFDWVEANLDEIQMSSPTFLRALMTAVCKAAIIADSSTFRVDTAVIKQRVPILLKYLDSDTEKELQALYALQASIVKLDQPANLLRMFFDCLYDEEVISEDAFYKWESSKDPAEQNGKGVKSVTAFFTWLREAEEESEDN

SEQ ID NO: 940 - DNA, 5860 bp, Homo sapiens
ggcggcggcggcagcggtcccccctcctcacccgaacatcagggccctccagactcaggcgccccaacaaattcctagaggacctgtgcaacaacctcttgaggatcgaatcttcactcccgctgtctcagcagtctacagcacggtaacacaagtggcaagacagccgggaacccctaccccatccccttattcagcacatgaaataaacaaggggcatccaaatcttgcggcaacgcccccgggacatgcatcgtcccctggactctctcaaaccccttatccctctggacagaatgcaggtccaaccacgctggtataccctcaaacccctcagacaatgaattcacaacctcaaacccgttctccgtttttccagaggcctcaaatacagcctcctagagctaccatcccgaacagcagtccttccattcgtcctggtgcacagacacccactgcagtgtaccaggctaatcagcacatcatgatggttaaccatctgcccatgccgtacccagtgccccaggggcctcagtactgtataccacagtaccgtcatagtggccctccttatgttgggcccccccaacaatatccagttcaaccaccggggccaggtcctttttatcctggaccaggacctggggacttccccaatgcttatggaacgcctttttacccaagtcagccggtgtatcagtcagcacctatcatagtgcctacgcagcaacagccgcctccagccaagagagagaaaaaaactataagaattcgggatccaaaccagggaggtaaagacataacagaggagattatgtctggaggtggcagcagaaatcctactccacccataggaagacccacgtccacacctactcctcctcagcagctgcccagccaggtccccgagcacagccctgtggtttatgggactgtggagagcgctcatcttgctgccagcacccctgtcactgcagctagcgaccagaagcaagaggagaagccaaaaccagatccagtgttaaagtctccttccccagtccttaggctagtcctcagtggagagaagaaagaacaagaaggccagacatctgaaactactgcaatagtatccatagcagagcttcctctgcctccatcacctaccactgtttcttctgttgctcgaagtacaattgcagcccccacctcttctgctcttagtagccaaccaatattcaccactgctatagatgacagatgtgaactctcatccccaagagaagacacaattcctatacccagcctcacatcttgcacagaaacatcagaccctttaccaacaaatgaaaatgatgatgatatatgcaagaaaccctgtagtgtagcacctaatgatattccactggtttctagtactaacctaattaatgaaataaatggagttagcgaaaaattatcagccacggagagcattgtggaaatagtaaaacaggaagtattgccattgactcttgaattggagattctcgaaaatcccccagaagaaatgaaactggagttcattgttcctgctgctgccactactgttagttctccgagtgctgccatcacagtccagagagtcctagaggaggacgagagcataagaacttgccttagtgaagatgcaaaagagattcagaacaaaatagaggtagaagcagatgggcaaacagaagagattttggattctcaaaacttaaattcaagaaggagccctgtcccagctcaaatagctataactgtaccaaagacatggaagaaaccaaaagatcggacccgaaccactgaagagatgttagaggcagaattggagcttaaagctgaagaggagctttccattgacaaagtacttgaatctgaacaagataaaatgagccaggggtttcatcctgaaagagacccctctgacctaaaaaaagtgaaagctgtggaagaaaatggagaagaagctgagccagtacgtaatggtgctgagagtgtttctgagggtgaaggaatagatgctaattcaggctccacagatagttctggtgatggggttacatttccatttaaaccagaatcctggaagcctactgatactgaaggtaagaagcagtatgacagggagtttctgctggacttccagttcatgcctgcctgtatacaaaaaccagagggcctgcctcctatcagtgatgtggttcttgacaagatcaaccaacccaaattgccaatgcgaactctggatcctcgaattttgcctcgaggaccagactttacaccagcctttgctgattttggaaggcagacacctggtggaagaggcgtacctttgttgaatgttgggtcacgaagatctcaacctggccaaagaagagaacccagaaagatcatcacagtttctgtaaaagaagatgtacacctgaaaaaggcagaaaatgcctggaagccaagccaaaaacgagacagccaagccgatgatcccgaaaacattaaaacccaggagctttttagaaaagttcgaagtatcttaaataaattgacaccacagatgttcaatcaactgatgaagcaagtgtcaggacttactgttgacacagaggagcggctgaaaggagttattgacctggtctttgagaaggctattgatgaacccagtttctctgtggcttacgcaaacatgtgtcgatgtctagtaacgctgaaagtacccatggcagacaagcctggtaacacagtgaatttccggaagctgctactgaaccgttgccagaaggagtttgaaaaagataaagcagatgatgatgtctttgagaagaagcagaaagaacttgaggctgccagtgctccagaggagaggacaaggcttcatgatgaactggaagaagccaaggacaaagcccggcggagatccattggcaacatcaagtttattggagaactctttaaactcaaaatgctgactgaagccatcatgcatgactgtgtggtgaagctgctaaagaaccatgatgaagaatccctggagtgcctgtgtcgcctgctcaccaccattggcaaagacttggactttgaaaaagcaaagccacgtatggaccagtactttaatcagatggagaaaattgtgaaagaaagaaaaacctcatctaggattcggttcatgcttcaagatgttatagacctaaggctgtgcaattgggtatctcgaagagcagatcaagggcctaaaactatcgaacagattcacaaagaggctaaaatagaagaacaagaagagcaaaggaaggtccagcaactcatgaccaaagagaagagaagaccaggtgtccagagagtggacgaaggtgggtggaacactgtacaaggggccaagaacagtcgggtactggacccctcaaaattcctaaaaatcactaagcctacaattgatgaaaaaattcagctggtacctaaagcacagctaggcagctggggaaaaggcagcagtggtggagcaaaggcaagtgagactgatgccttacggtcaagtgcttccagtttaaacagattctctgccctgcaacctccagcaccctcagggtccacgccatccacgcctgtagagtttgattcccgaaggaccttaactagtcgtggaagtatgggcagggagaagaatgacaagccccttccatctgcaacagctcggccaaatactttcatgaggggtggcagcagtaaagacctgctagacaatcagtctcaagaagagcagcggagagagatgctggagaccgtgaagcagctcacaggaggtgtggatgtggagaggaacagcactgaggctgagcgaaataaaacaagggagtcagcaaaaccagaaatttcagcaatgtcagctcatgacaaggctgcattatcagaagaggaactggagaggaagtcgaaatctatcattgatgaatttctacacattaatgattttaaggaagccatgcagtgtgtggaagagctgaatgcccagggcctactacatgtttttgtgagagtgggagtggagtccaccctggaaaggagccagatcaccagggatcacatgggccaactactctatcagctggtacagtcagaaaaactcagcaaacaggactttttcaaaggtttttcagaaactttggaattggcagatgacatggccattgatattccccatatttggttgtaccttgctgaactggtgacccccatgttaaaagaaggtggaatctccatgagagaacttaccatagaatttagcaaacctttacttcctgttggaagagctggggtcttgctatctgaaatattgcacctactatgcaaacaaatgagccataagaaagtgggagccttatggagggaggctgacctcagctggaaggactttttaccagaaggagaagatgtacataattttcttttggagcagaagttggacttcatagagtctgacagtccctgttcctctgaagcactttcaaagaaagaactgtctgccgaagagctgtataagcgactcgagaaactcattattgaggacaaagcgaatgatgaacagatctttgactgggtagaggctaatctagacgaaatccagatgagttcacctacattccttagagctttaatgactgctgtttgtaaagcagctattatagccgactcttctaccttcagagtggacactgctgttatcaagcagagagtgccgatcttactcaagtacctagactcagatacagagaaggaactgcaagcactttatgcactacaagcatcgatagtaaaacttgatcaacctgccaatttgctgcggatgttttttgattgtctatatgacgaggaggtgatctccgaggatgccttctacaaatgggagagcagcaaggaccctgcagagcagaatgggaagggcgtggctctgaaatctgtcacggcattcttcacgtggctgcgggaagcagaagaggagtctgaggataactaaaacttcaaatacacaaaatgaaacaaaagaaacaatttaagtatttttttaaaaagtttcacgtcttcgccaatcacagtgcagcaaggccaattctcgcagaaacccccacgtgtgcacgagtgggagaggggaaagagaaaaaaaggtgatcatggaggaaaaaggtactggataaaagtaaacttcaaaccttagggcgggagcactaaaaccaaaatacatgtattatttatagaaaatattttctgttttaatcttttctttttaaacaaggactcatacttaaaaaaatgtttagcaaaaaaaaaaaaagttgagaacttttaatttattttaaggactgcaaatgccagtgtaattttttaatttgcagtttctgtaaacaacttgtataatagaaaagcagagaaataaatttccctccccttcaagatgcacctcatgtttgttttaaggtatagcatttagtccagatttgagaaagtttggggtgaacaaggtaagaaagatttttttttttttggcatcaaatctttctgcctgcctctcagcttgcttcagaaaatttaaaaaatcacaatagtaatcaaaacatacataacattgaaacagaaggaaatgctgtggaccacagaactccaagaattgtttaaaaaaaaaaaagtgctaccctgagaaaagtactcttaatactcttgaaatctttagagcaactttaaggcttgtaaatacatagaacaaatatttaaaaaaacaaaaagaaattgactcagtactatttcttttcactttgaaaatataaagaacaaaataaagacaaacattgcaagtttaaaagaaagtaaa

SEQ ID NO: 941 - protein, 1552 aa, Homo sapiens
MNSQPQTRSPFFQRPQIQPPRATIPNSSPSIRPGAQTPTAVYQANQHIMMVNHLPMPYPVPQGPQYCIPQYRHSGPPYVGPPQQYPVQPPGPGPFYPGPGPGDFPNAYGTPFYPSQPVYQSAPIIVPTQQQPPPAKREKKTIRIRDPNQGGKDITEEIMSGGGSRNPTPPIGRPTSTPTPPQQLPSQVPEHSPVVYGTVESAHLAASTPVTAASDQKQEEKPKPDPVLKSPSPVLRLVLSGEKKEQEGQTSETTAIVSIAELPLPPSPTTVSSVARSTIAAPTSSALSSQPIFTTAIDDRCELSSPREDTIPIPSLTSCTETSDPLPTNENDDDICKKPCSVAPNDIPLVSSTNLINEINGVSEKLSATESIVEIVKQEVLPLTLELEINPPEEMKLEFIVPAAATTVSSPSAAITVQRVLEEDESIRTCLSEDAKEIQNKIEVEADGQTEEILDSQNLNSRRSPVPAQIAITVPKTWKKPKDRTRTTEEMLEAELELKAEEELSIDKVLESEQDKMSQGFHPERDPSDLKKVKAVEENGEEAEPVRNGAESVSEGEGIDANSGSTDSSGDGVTFPFKPESWKPTDTEGKKQYDREFLLDFQFMPACIQKPEGLPPISDVVLDKINQPKLPMRTLDPRILPRGPDFTPAFADFGRQTPGGRGVPLLNVGSRRSQPGQRREPRKIITVSVKEDVHLKKAENAWKPSQKRDSQADDPENIKTQELFRKVRSILNKLTPQMFNQLMKQVSGLTVDTEERLKGVIDLVFEKAIDEPSFSVAYANMCRCLVTLKVPMADKPGNTVNFRKLLLNRCQKEFEKDKADDDVFEKKQKELEAASAPEERTRLHDELEEAKDKARRRSIGNIKFIGELFKLKMLTEAIMHDCVVKLLKNHDEESLECLCRLLTTIGKDLDFEKAKPRMDQYFNQMEKIVKERKTSSRIRFMLQDVIDLRLCNWVSRRADQGPKTIEQIHKEAKIEEQEEQRKVQQLMTKEKRRPGVQRVDEGGWNTVQGAKNSRVLDPSKFLKITKPTIDEKIQLVPKAQLGSWGKGSSGGAKASETDALRSSASSLNRFSALQPPAPSGSTPSTPVEFDSRRTLTSRGSMGREKNDKPLPSATARPNTFMRGGSSKDLLDNQSQEEQRREMLETVKQLTGGVDVERNSTEAERNKTRESAKPEISAMSAHDKAALSEEELERKSKSIIDEFLHINDFKEAMQCVEELNAQGLLHVFVRVGVESTLERSQITRDHMGQLLYQLVQSEKLSKQDFFKGFSETLELADDMAIDIPHIWLYLAELVTPMLKEGGISMRELTIEFSKPLLPVGRAGVLLSEILHLLCKQMSHKKVGALWREADLSWKDFLPEGEDVHNFLLEQKLDFIESDSPCSSEALSKKELSAEELYKRLEKLIIEDKANDEQIFDWVEANLDEIQMSSPTFLRALMTAVCKAAIIADSSTFRVDTAVIKQRVPILLKYLDSDTEKELQALYALQASIVKLDQPANLLRMFFDCLYDEEVISEDAFYKWESSKDPAEQNGKGVKSVTAFFTWLREAEEESEDN

SEQ ID NO: 942 - DNA, 152096 bp, Mus musculus
  misc_feature (1)...(152096): n = A,T,C or G
ctctctctctctctctctctctccctctctctctctctcccacacacacacacatgaataataaaatgtagtataattttaaaagctgtaccaacaacactctataagatatgctcataacctcaatctgatttagatttttttcttacaagatttaaaacactattcattacagtagcaactaaaaacgcatagtctccagattttaacgctactattaacagtgtgatataaaataatacaaaccatctgtgtgggcggggtgtaggtagagctttggcaagtaggaactttatctcccagtgccacctagtggaaatgctaaagcgggcttccagacgctttttaatttctatatgaatatagaaattatatgtattttgagcatatcaactgctcaccccacctccaatgcatcccagagttcctctgctgccttttctcctctctcaacatcacgttctccattcaaaacccatgagttaaatcagtgctgtccataagtgaccatcatttcagaatttacccttaggacggccataaggcagcaagtctgggagaatacaatattcaagtaaacccagcacctaagaaaaatccaattcccatacttgtggtattacttaatgaggtattttaattcataaccatgaaaataaaagcctctttagataagtcagacttatcaagggtttagtgaatctaatgaactaaatatcagttccaaatatgagcttgttaaagaactaaatgcactaaaaagaaaatattacaccataaactttgtagcagctgctgttcgtggggaagctaagctgaagttactgagagcacttcaatcttacacttttatccgatgcatgaatatctatatttccgtaaaccgttccacaacagatcacatcgcctcctttggtttgaacatgcaacttttgactctgaaaaacaaaaaaccacagagggtagagacagtaagcttgcatgaaactttttcttctgtgcatgtccataagataatccagggatttaagcaaagtattgaaaagacaaaaagaaaaaaccgttctcaaaagaatttggtttatagtatctcgaactttgtcacagtcacagatgtgaatctaaaagccaagatatcaatgaatttttagaaagacctgtttccaaagtaactctgctttcagatctgaggctgaccttaagtgaatttctggactgtttctggaactcatgacattgtaagcaaatgttcacatgcatgctcatttgtgtagagagaaataatcatgagattttccaaagaggcctatctatggcttaaagacactgacattgtaacgtgaaactcacctaattcccacacaacatgaaaaagttttaaaagtgaaaataagtcagaaattattgggggaaatttttatgctacatttttaaaaactgcaaatgtgtgacattcacatactttattccttaaggatgctgaataaatgcagcattgccatacgtcttccttggctaagaaagcaagctgggacaagtttaagcctggaaagcacaaatgtaaggtcaaaccccagctccactactttagctgtgtgttcgtgagtgagtctgtaggccttttgctgcctcctagtttgactcttgacaaatgaagatgctccaaggataaacaaggcttagctgagattctcagtacctactaactgttcattagcagtaagcattgttattaaaatagcataaccctatgtatgatgttaaataaccctatgtatgatgccaaataagtgaaagacatattaacagatgatcactaatttaagatgatattgtgccctatttttaaaaacctaggccagctatcttaccagtgtctgcatttatgagtgtaagtaagctaagaccacattgcaagaatacttctctaagtaccagactggtgtcttagtttctttctctgctgctgagatgaaacatgacaaaaccaatgttgggtaggaaagggtttacttgggtccatcggagagggagtctaaggcaagaacctacactgagcaggaatgtcatcaaagaccatgggggagttctccttattagcttcctcagcctgctttcttatatagcctaggaccacctgcctagggatggcacaaccacagtggcctaggccctcctcatcaatcattaatgaagaaaaggcccccacagatttgcctagaggccagtttgatagatactcaattaaggctgcttcttcccagcgactctaatttgaggcaagttgccgtaaaccagaagaacaagtgtcagttttagatctaattcatttttgagctagtatatttgtaaagattgtgggttcatagctctattttctcttaacaagtccttcacagaacaaatacaaagtaaagaaaagaattagactctaccttgaaattactgaaattaattcaccaaaactgaagcatcannnnnnnnnnnnnnnnnnnntgaaattaattcaccaaaactgaagcatcattgagtgaataaacatttctaaggaagaaaagaaattacagtattcttttttttttcagaacagaagtatttttttaattaggtattttcttcatttacatttcaaatgctatcccaaaagccccccatacccccccactcccctacccacccactcccacttcttggccctggcgttcccctgtactgaggcatataaagtttgcaagaccaaagggcctctcttcccagtgatggccaactaggccatctcctgctacatatgcagctagagacacgagctctgggggtacaggttagttcatattgttgttccacttatagggttgcagactcctttagctccttgggtaccttctctagctcctccattgggggccctgtgttccatccaatagatgactgtgagcatccacttctgtgtttgccaggcaccagcatagcctcataagagacagctatatcagggttctgtcagcaaaatcttgctggtgtatgcaatggtgtcagcatttggaggctgattatgggatggattcccgggtgtggcagtctctagatggtccatcctttcgtctcagctccaaactttgtctctgtaaatccttccatggatgttttgttcccaattctaagaaggggcaaagtgtccacaccttggtcttcattcttcttgagtttcatgtgtaaattgtatcttgtatcttgggtattctaagtttctgggctaatatccacttatcagtgaatacatattgtgtgggtttttttgtgattgggtcacctcattcaggatgatgccctccaggtccatccatttgcctaggaatttcataaattcattgtttttaatagctgagtggtactccattgtgtaaatgtaccacattttctgtatccattcctctgttgagggacacctgggttccttccagcttctggctattataaataagggtgctatgaacatagtggagcatgtgtccttgttaccagttggaacatcttctggatatatgcccaggagaggtattgcaggatcctccggtagtactatgtccaattttctgagaaaccgccagactgatttccagagtggttgtacaagcttgcaatcccaccaagagtggaaaagtgtttctctttctccacatcctcgccagcatctgctgtcacctgaatttttgatcttagccattctgactggtatgaggtagaatctcagggttgttttgatttgcatttccctgatgattaaggatgctgaacattttttcaggtgcttctcagccattcggtattcctctggtgagaattctttgtttagctctgagccccatttttgaaattacagtattcttattcagttagtcattcaaattgaagatttttattgcatagtatttttgtttataagaacccaaaccaaactatatgcaaaaactgctatctggggtagtcctaatcttttatgatgtttgcacaattagttcttttagctgcctcatctacaggtaggcaggaaaagcacaagtgcagataaagattgacaaatgaaccaatgagatgaaaacaggatgtgtcaatcattctcatcaatgtcgtaaaagttaaagctatgaaactacaacacaaagatgaccaagttcaacgaagcctatcagagtattgggttttgaccctgcaatgccgtaacaactagaaagacgagcaaccttccctacagagtatattttgaaatatttatagctaagtctaatctcatttttaaaaaatggaatgtaaaaatgttaattacaaaacaagaggaagtatctgctattctgcaaaactgcccgcctaaacctctggtaaaaagcttctagtctattaacagtttcagtaaaatagccgtattttttaagtacagttataggacataaaggctttctttgttctttaataagtagaagaaaatgaaaatgttgcaaaatgtactttgcatcaatgatgcttgagttttaaattaatttcaataatttcaagatagagtttaatttttttaagtacttttttttgttttatagtgtctcaaaatcctaaatatatactttggggtttaactatactttgaaatgaaatctataataataattatgatattataaacataaaactttcaaagttgctatgacatttgtgctttttaaggcaaaatttttggtagagactctaaaagacgaaagagaataatctaaataacaaattaagccttgtagtttgatatagtattttatgttttgtagaggtaaggtatttctgcaacctgaacaaagttaccttcacagactgcaggatgctggtcccctgctcagtgtcgattttacagctatcacattcaatattctgcaccttcacagagccagatcctgatgactcaatactcaaatctagaagcacaagcagaaagaaggaaaaagtcagtgcctaggccacagggcattttagtactccctggatgcccagatcctcagggattcgcagcagtacttagctggagatcagtgtggtttcttcctgaaaacaagaggtctttcctaaggcagcaagaccaaaggcagggctgttctgacagtttagagatcatatctcctgccttgttcatctaaagagaggcaataccacaggagggaagaaaggagctgagacggccatccttgtaggtaggtattcatgtctcctgaggaatatcatagaagccccatgcagcagaaagaacacacacaaatgaataaggatataacagtgaaccagcaagccatcaaatatctgctgagtcggccagccttgtcctatattcccctaatttaaagaatataacaatagtgtagatcagtgtatgtggccatgacctaggctttcaaattctactctagcctttcataaccccaacatgaaaatacttccacataaccacatcagaaggtacttgatgtaacttttaacaaccagaaccacttttaaaaactgagtgatatcagataggggacaatatccactatatatatataaagaactcaagaaaatggactccagaatatcaaataaccctattaaaaatggggtacagagctaaacaaagaattttcacctgaggaataccgaatggctgagaagcacctgaaaaaatgttcaacatccttaatcatcagggaaatgcaaatcaaaacaaccctgaggttccacctcacaccagtcagaatggctaagatcaaaaattcaggtgacagcagatgctggcgtggatgtggagaaaggaacactcctcctttgctggttggattacaagcttgtacaaccactctggaaatcagtctgtcagttcctcagaaaattggacatagtactaccggaggatcccgcaatacctctcctgggcatatatccagaagatgttccaactggtaatgaggacatgctccactatgttcatagcagccttataatcaccaaaaagctggaaagaacccaagtgtccctcaacagaggaatggatatagaaaatgtggtacatttacacaacagagtactactcagctattaaaaacaatgaattcatgaaattcttaggcaaatggatggatctggaggacatcatcctgagtgaggtaacccaatcacaaaagaacacacatgacatgcactcactgataagcggatattagcccagaaagttagaatatccaagatacaatttgcaaaacacatgaaactcaagaagaaggaagatcaaagatacttcgctccttcttagaatggggaacaaaatacccatgggaggagttacagagacaaagtttggagctgagacagaaagaaggaccatccagagaccgccccaccctggggatccatcccatatacaaccaccaaacccagacactattgcatatgccagcaagattttgctgacaggagcctgatatagctcttttttgtgaggctatgccagtgcctggcaaatacagaagtggatgctcacagtcatctatgggatggagcacagggcccctaatgaaggagctagagaaagtacccaaggagctaaatggggtctgcaaccctataggaggaacaacaatatgaactaaccagtaccccccagagctgtgtctctagttgcatatgtagcagaggatggcctagttggccatcaatgggtggagaggcccttggtcttgcaaagatcatatgccccagtacaggggaatgccagggccaggaagcgggagtgggtgggttgaggagcagggcagggggggaggttatagggggctttggggatagcatttgaaatttaaatgaagaaaatatctaataaaaaaaaagaagaaaaaacaaaacaaaaaaaccccgagtgataaggagaattaaagccacaatattgtggataaataagagtgtatttaaagaaaatttggaaaatagggattgaccaggtggccttctcagctgtaatttaaagtgtcactttagatatctccttataaaaacaaaataattgctgggcactacagtgcacgccttttatctcaacatttaggaggcagaggcagatggatctctgagtataaagtcagcttagtctacactgagttccaggatagctagagctctgtaaagggattctgtctccaaaaaaaaaaaaaaaaaaaaaaaaaaccagcaataacaaaatattaaagagtgactacgactatgcaattgcattaatattaaatttcccttaagctggagtacagaaacaaaaactactgtcatgtgaccttggttgatcaaacactgaccaaagtcatttggtgaaggaaagggtttatctcctaacttacggtccatcacgcagtgaagtcaggacaaactcagggcagaaactgaagaggagatcacagagaaataccgccttgctctccaggagtctctcagcttgcttttttttttttaatataacccagggtcaacccgtgtggttgggccctcccatatcaaccattagtcaagaaatgcttcttgattaatgcagacttgcctacaggccaatctgacaaaggcattttctcaattgaggctcctctcccaggtgattctaggtgtgtcgcgctcactacaaactaaccagcacaattatgttccccaaagcgcgttgttgggacccactgccacaactttaatcattacagtataagtgccctccactgcttggcactgggttaaatcagcaacatgcactgagaggaactgagagtgcatgaaagccatgcactgacacaagcagaactgcctgcccacctgagccttgtcatatggcaggaaacaaggcagagctgacaactatacaggtaagcgaagggatgctaaacacactctgttgctgggaaggagggcggggaattaaggttaacacaggagtagtaatgggacatccactgggacactctatcacaagctggaggaacaactatcaataaaatcagcgatgtagatttgaggggcctatggaatcgaggcagtaccctgaaaataagcccctggctttaaaaagaagcagtgaggtaatttgggatcgctgggagaggtaatacccatctcagagaggctgttttaagttttgcctctctctcctttgactcccattttattctgcactgtggtaaagccccaccggcacttcagagtattaaaatttggaggcactgtctcttattcatttaggctagttagaagttgagaagcaacgaagcctaacagctcacatcctagccctgcctacttgtatttaaggtggaaagacacctaaggaagcaaatttcataatgtcaccacgcacggggcctttgtttgttcagtcacagtatgtatcttatacttcctttacttcaatgtcctcatctgaaacggtgacaaaagcatccaccctaccgagcaactgtgagggttaatataaaataattttagaagaggtaaacggtgctattgctatcatcagcaacaccatccttcagttccaggaagaatgagagccccagaaccctttctagaaaagtatgtgtgctcagcggtttgcatctgggaaataaaataacgggactcagatgcctaagaaatacgttttgcaggtactattatgaatttccccagacagtcttaactatgtgtcttgcttcaaagtttgtattcgcagagaatttacttatgcctaaatgaatagacatctaccaacctgggtacctgttggaaagcaaggttttttgttcgtttgtttttgtttttgtttttctagattagctggaagcatctatacatagagctgacgagggaccagagccccgagatgtgggctaccaaaccactggatagttatcaagaaacctcaaccctgaacgatgctaatgactgtgatgctaatggctccacaatgtaattagactcagattattccaatacaagcttccactcggctttaattttcctccttaattggaaacccaacgcttaaacactattagttttgtgacccaaaccctttttcacttcacttgccaaatttgacgggcgcgttcacctccaccgacgcctgggggtcgatgtcgtccgacagaatggccatctcctgccgatcagcatcatacttgacctgcaggctgtccaggccgcgcgccacgtgctccacgccgcacaccgccacctgcacgcggtcgccatccgggtgcgcaaggggatccaggggcctcacggccaggtggcaagggagccgcgccctcagtcgcccaaacgggctcacctgcagcgtccactccctcagagccccacgcgccaggccggccccagagtcatcgggcgctgatccctgccgctgcgccccactggagccgcaagtccgagccccgagagctccgaccaaggcgcccgcccgcactcgggacgcgcaaggagggaggcggccgaacatgctctcccttggaacgcttcagccttggctcgctggtcccgggaccacaagaaccacgagctgcctcgggtcagtcacgaaggggacagcatgcacggctccgccaaggaagaacgagccaggcccccagcacagtacttaacgccttaaatcccggtaggaaagttaaaacttcaaagagcctagttgaaaccctgacctggacaagtcacctatttccgcccctttggcggaggccatcgggatatgtagttttaaaggagccaaacatcaaggtgttctggtaactgtgaaactacatatcccaggagacagtgcgctgaatacacagactgacagccgattggtagaggagcccccgctcccccctcgttgctttcccgttgcttcaagcccattggccaagagagcagagaaagaaaaaaagttaatgtaactgaccaataggaagagtagaagggacgggataaactcagctgtggttactttggataccaaggacgcgactcttaggagagggtgaagttttgaagtgagaccccagggaccaaaacacacggagaaaaataagagtttaaacaaggatcaggaccaaaagaaagggtaagaaacagcatgtttatagatgggaatcagattcaaagttaggaatactttctttaggtagttagaaccaaaggtcaccaaactaatgtggattccctgggaatagagaatccccctcacaagagaccttagcatgagaggacagacacgttctgttgctttctcccttctctgtcctttaagggaactcccacttaggtaaaaaatactagatagaaaaagtgttagaagccaggtatggtggcgcacgcctttagtcccagcactcaggagacagaggcaggtggatttctgagttcgaggccagcctggtctacagagtgagttccaggacagcctgggctatacagagaaaccctgtctcgaaaaagaaaaaagaaaaaaaaggaaaagaaaaagtgttagaattctggctctttcttaactgtaagtagtaatcttaggccagtcattggatgcctttgggttttactatttgcttataaaatgatgacactatcttccttgtcttgtgtagaagttttttttttcgtttttaccacatttatcaaatgaaacaatggacaacaaagcagtgcacagtatacaaaacaaagtattttaggaatggcatatgtctacgttgctaagagatttggagacatttgaacttggttagaggacagtcttgatctctttccctgcaactggtccttggccttaatggtaaaataaaatctctctctctctctctctctctctctctctctctctctctctctctggatcataagacttgttaggggatgtcagaattttttcctggtcctgttgtattatctatggcacaagaaatgtttcttcagttttgatataagacagactgtgctaaataactctataagttaactcttttttttattattcagtaggcagtaaagataatgggaaatggggggtgtggacattatttcagccatatttgcctattcttctccccattctacaaataattccctaaattccttacatacagatttaactaattgcaagtccagtgtgatggtgttcacttgtaagttttcagagtttgggaagctgaagcagaaagatctcaaatctgaggcccacctggactatatacggagaacgttgtgacaaataaaatacacaataagtaaataaaatgatacctttaaagatcaaaactctcagccaaatatgggaccccaattctttgaacctgaagtgacagatggatagatagactaggctaaagtcctccccagcgtccatgttgttctcttagtgaagactatggtagtggtggtggcagtgacagccctgccctgctgtcagccatctgagaagaaggcccctatccttgaggacctccaccaaggtgaaacctgtccttgactttgctggaaaaaaaatgttgggagaagctaatgtgaaagagggttgatttaaaatagattttaaacaagggtttaagagcacaggggttgctagaggtgactgatcacacagggagagaaagagacacacccaagagcacaggtgtaagctcccttgagcttgccctaagtgacttagcagaagtgctccagagtcactcttttgctgactctcatgttatgcctcaaaggatttctctaagaaacttctttaaaacctttctcttcttcttctttttcaataagtgagattataggattactctagagatgtcttggattgggttacagtcctaaaataaaactgtgtgtcacaagaattgtaaaagggaattaaaacatgtcctttactagaagtagggttttgggtaagatttctagaaaactgttggtttatagctgagaaagaagaaagaacacatatatttaggccttacatgtgatccattgctccttcaacaatgtaacttgaaagtatcactatgtaagagactggtgatcctcatcgataatgttgacagctgtgttagaactcttcatcttcagctggtgagacacactggtcaggctctggaatgagggctccttttattcccagttctccatcatgttcccgtgtttctctcctgcctcagtaggctataagatagactttatgataagcaagtgctcactcagtgagtagcgccattggctttgtgtcccatgtggacgtacgtactcagacgagccttcaagttatcttttttaaatgaaaacccaagagtcatactttgacatttgaaagaggcacaagcaagttgaaactgcgctctgatttgctgtggacgtgctgcatatatttgggccgaatatgcatccttaataaatcatcctgttcctatagtcacttttccttttctgaggaaaaataacttaatagaactgacaactgagccatcatgatatctgtgacacggtcattatttcattactttcaagcaaaggaactaaaacgtactgaaagactaccttcctgcttttatgagggtggaacccgagaatctggtagagattaagagtgacgtaagatattagttaccaatgcctaacaagctagtcagtatcaaacttgtctacctgtaaaagtgagtgatatagttttcaaagtatgttcccgtgtaccatctcacggttttctcacaaaaagctattaagaaggatagttattcttctccctgcatgacagctgaagaaacaagattcagaaaaacaagatgaagccattatgacccccaaaactgtggttctggggggatgagagcattaaattacaaatgtacaagatttttttgttttgtaggactacttattaataaattatttctctgctggtgagatgagccaattcaacccagattagattatattaaattccggtttattgctcttgggtgggcaagttcattgaccccaaggaagggggagagagggaaagaaagagcacacacacacacacacacacacacacacacacagagagagagagagagagagagagagagagagagagagagagacacgaaaatgtctggattatatagggaagagcccctgggggaagggcagcccagcccctgggctgcaaacttcaggggtggaggcaggatatgccaggaagggactgagggatgttgggagaacctggaggccacatctgctttgatatgttaaaatatgcacctcactcccttgtcttggagtctgaagccaaacacttaaaagagtttgaaataatttaaaaatctaagtgcccctaaatgagagagtaatgcttaaataaattttatatttgtaatattataaagaaatctaaaaataatatcctgaaataatccataatataatattgggtaatagagtacttagtaacctttgtgtattagttcaatctcaattctgtaacggcaataatatatttaatatagaattacatcacagaaacaattccagaaggatgcacaccaccttataatgatggctatctatctctaagccacgaggttagatgattacatcatttgcatgttatcagtagtgatcatgtttggcatttttaatgaagagaaacagtaaggccttcttagtgtgtactgttgcctaaggctgtcttagaaatgtagggaatttcttagcatccaaacataaatgcagttgtgtagagaatctcctaccaaatcaatgtgaaaggtggtgactttgttattactttatgttcaattcatggacagcagagggcagaagagttttcagaagaaaaggtaatcagaccaaggattaagtagctcagttaaagggatgaaggccaccaaactgtgctcgattctgaattacagataatgtttaaaacaaacaaaaaaacttctgcagtttctgttattcttataagacaataatacactcagaaacctaagagctatcacttctgagaatatataatgaatacgcaggtggacccacttggaatcaccttgtgaaactgccaggctaaccatacctgtgaattgtgaatcagctgagctcgctggccaatttaaaacttcaggggaagcgtttggcatctcacagtcaaccgtgatgttggctgcacaattttccaatgcccctttgaagatatttaactcctggtttactttttatttgagtgatattatattttaaatgattttttctgtttgtattgagatgaccagatggtcgttttgaaatggactgtggtgtggtgatatctcagaataatttaaatattgaaccatttttccttccctggatgagctttaatcatgttgtgatcttttctgtataagttggtagattcaactaatggatcaatgagaatttttgtattttattttatatgagctattagcctgaaattttctttgacattttttcttcttttaggtatcagggtaaattaggaggaaagtgttccatcttttttctttctgagagaattaattggtattgtggtttgcttttatttgtttttctcaaaaataaatccactttcttggttttgttttttggatttatttattttatgtatgtatatcagtgctctatctgcatatacgctggcatgccagaggagggcatcagaacttattctaaatgattgtgagccaccatgtgggtgctgggaattgaactcagaaccactggaactcagtgcccttaactgctaagccatctctttagccaaatatctggatatgtgtgaaatttgcactctctcatgtgtgccccttagctgtgtttgcatgctgtgcatctcttcagtctttgtacatcatcctggattgtgtactcaaatctgtgttcacgtctgctaattctttcctagttttagctaatcttgtatggaatgtccctatagggttttcttagtttttaaattaggtttattttttcttatgtgtttggatgctttgcttgaatgtgtggctatgctaggtaccatatgagtgtctggtgcctacaaagatcagaaaagggtgtcagatcccctgagagctctcatgtggattctgggaatccaacccaggttctcttcaaaagcaatcactaggccatttctctaaccccacattttcttcctaatggctgtgtcttcttttggggggttgatttggtttttctacaaatctgctttctctttaaaattgccctgtgtgttgtagttcttttttagtttcaatgttacatctttgaactgttttgaaattcagttacactgtgtacaacttacatgttgctgtttctcttttgtggtctccctctcttgggctttctttcctaccatggcctctatatctgttattggtctcccatctccaataggagttaactgttgaggaagtcctttcacaactaagttaggatgattccctcctggctggtgaggagcagcttcattcaaagccttttagttttctggtcatgggaaagtttttaatttttaaccatttcatttgtctttaggttttagctttttaaaaataaactagctcattcatataggaaatgaatgcaaactataaggtaaaaggaaatgtataatgaactgaacatatttttgcaaaatctcaatttaagaattaagatactttcgttgtgggtttttttttccctctgtttattttgtgtccttcctgtgggctgaactgaaatgaggaccaaaagactactcagatgcagaaattggagggaaatccggtttgcttttgttctgttggtcctgccccaaggccagttccactcaaatttgcactggcattgtcaggtcatacagacacccaaaagtacgacagacactgagcctttaatagagaaaaagggtggggactggggtggggtgaagatataggggatacccgtgctcttttcttttttcttgctacttggccttgtgggactgaaatattgggcactaaatgacaacataaggtaaggttatgtgagaacctggtctctcaggttcaaaggaaccacaacaagctaggaagagttacaagggaatttcatatgagacctcgggaaaatgatgcttgattttacatctgatctctacaaacacccaaaatgggcttcacctctgcataaacatggaagacagccaaaaatttaattaagacttgaagaagttgacagcagtaaaacacccagctctcaagacaactttgaattttgcatttatataaaaagtcattccacataacaaaggctttggaaagaaaacattacaaccactctccacagaaggcagataattgtggtctgggtgtaactaaactgcatggctataaacagcaaacaaactgagtaagtcttaaggagacccagagctttacagaatagtatttaaaacattcaacatccaagcaaaaattacccaacaaatccaacatatcagaaacagtctgaccagttttcaataggaaaaaaaaatcaacaaatccatcttcataataggtttatttacattatctagaaaaactttgaaccaatccagatatctctcaaatatgagtgggaaaacaagtctcttgcatccatttgaagaggtgatagcctatgaaacagataaatggcaaaattctttttaaattttatttactctttttttttaacactccagattttatttccttccaagtttaccctctgactgtttcacatcccatacctcctccctgccctgggtcttcatgaggatgtctccacccccacccccacctcaccagacttctaaactccctggggcctcatgtctcttgagggttaggtgcatcttctctgactgaacccagacctggcagtcctctgctgtatatgtgttgggggcctcatatcagctggaccacctagttagtggtccagtgtctaagagatcttgggggtccagggtaattgagactgctggttctcttacaggattgttttcctacagggtcaccctcctcctcagcttctttcagcttttccttaattaaaccacagtgtccagcagcttctgtccactgattgggtgcaaatatctgcatctgactctttcagctgcttgttgggtcttttggagggcagtcatgataggtccctttttgtgagtgctccatagcctcagtaatagtctcaggccttgggacctccccttgagctggatcccactttgggcctgtcgctggaccttctttccctcaggctcctctccatttccatccctgcagttctttcagacaggaacaattataggtcagagttttcactgtgggatgacaaccccatccctcacttgatgctctgtcttcctgctggaggtggtctctataagtttcctctccccattgtagggcatttcatctaagatccctctctttgaatcaagagagtctctcacctcctagatctctggtatattttggagggtccccccaacctcctacctcccaagattgcctgtttccattctttctgctggccctcaggacttcagtcattttccttcacccaataccagatcatgtccccccctccccaattccctttctctcctaggtccctcccccccttgtgattgatttttttctctcccaagtgggactgaggtgtcctcacttgggcccttaagcttgttgaactttttgagttctgtggactgtaccttgggtattctgtacattttttggctaatagccacttattagtgagtgcatactatgcatgtccttttgggtctgattatctcaggatgatattttctagttccatccatttgcctggaaaactcaggatgtcctcattcttaatagctgaataatattccatgtgtaaatgaaccacattttctgtatccattcttctgtcgtgggacatctaggttgttttcagcttctggctatcacaaataaagccattatgaccatagtcaaacatgtgcccctgtggcatggtggggcatcttttgggtatattcccaagagtggtattactgggtcttcaggtagatctatttccaattttctgaagagcctccagattgatttccagagtggttgtaccagtttgcaatctcaccagcaatagatgagtgttcctctttctccacatcctctccaacatgtgttgtcacctgtggttttgatcttatccattctgatttgtgtaaggtggaagggaatctcaggatcattttgatttgcattatctgatcactaagggctttgaacatttctttaggtgtttctcagccattcaagattcctcagttgtgaattctcggtttagttctataccccattttttgattgagttgttagctttttgatttctttatatattttacatattaaccctctattggatatggggttagtgaagatttttttcccaatctgtaggttgctgatttgccttattaactatgtcctttgccttatagaaactttacagtttcatgaggacccatttatcaattcttgttcttagagtgtgagccattggagtttaggaaatttccccctgtgccattgagttcaaggctctttcccactttctcttctattggattcagtgtatctggttttatattgaggtccttgatccacttggacttgagctttgtgcaaggtgacaaatatgggtctattttcattcttctacatacagacagccaattagaccagtactatttatcaaagatgctttctttttttccattgtatatttttagcttctttgtcaaagatcaagtgtgcgttagtgtgtggttttatttctggtcttcaattctattcattgatcaacatgtctgtgtctgtactactaccatacagtttttaatcactattgctctgtagtacagctttaggtcaggaatggttattcccccagaagtccttttattgttaagaattgttttcgctatctggggttttttgcctttccagatgaatttgagaatttttctttccatgtctttgaagaagtgtgttgggattttgatgtggattgcattgaatctgtagattgcctttggtaggatggccatctttactatgttaattctgccaatccatgagcatgggagatctctccattttctgagatcttcttaggtttctgaccacactggtctctccagagacgaacatctgactgagtcttgggagggcatggtacctactctcctttgggagttctgcatccccaactggtctcaactgtacagtttccaaagctcctttagtaatagcctcatatcacaccttaaagaattcttaggcttttagtttccctaccaaactcaatacctgtctctcaccactctatgacctctccggcctctgcacctagagaattctctttgcttgtcatctgaagggataaaagtcgtgatgtcttattgctgttcccaaattccctcatcagtgcattgatattcttaaatgcctgagctctaaactgtttccttctttaaggtaaggttctgggttcatatggtactctgagggggctgtgtgaaacttttctctcatcaccaactcagaaatttatttttatataatataattcatccaaatatttattcatttaaatttattttatttgcgtatttattttatttagatttgtgttatttaaatatttattttgtttaggtttgtgttagacttatttacttattttatttagacttaattacttactttattttatttttcttgcttcttccaatgcaaaggtaggaaaattgggttggtaaactattcttctaactgggtaattgataagcctttgtcctctagaggaactagattgggtaagtgactctatgtggaggaagactaatttgaaggttgactttgggtgggtggagacaggaaatgcctacttaaccagaaagggagactgtgaacaacacagacatgggaggggcacctggcccacttcacctgctgtgcatggtggctcttccctgacttggagttgactaaggactgtcttgctcactttctctttcttcaatacccaatgtcctgcacaattctagccctttgttttagatcttatggtgtaatttgaagagcaaacctcccattgaagtttgctatgcattcacactaataccagattagagttctgggataaactcctggacaggaccaactcatagagcttgtgtgttattgaaatgttaacagagcatcatatatgcaagacaaaagaactggccagtggtgtatgcacgttcatgatggtggaggagtgtctgctgtgctctgggctgaggccactgctgtcaacccctttagcagctgatgggacagatagaggtttcattattgtgcttaggtcactcaggaagggaagaattgagattgaagtctaaactgaacttcaagtaagtttccatccctggggaccagtttaaagtggtgaaccccaggctgtgtaaggaagaggaggagaatgaagaagaggaggaggaagaagagggagtagtcatctattacaaaagcctaagaagaaagggcttttccaagaccattgggggaaatctttgaagatatatgtttttaattttgtgcctatgtgagttaatgggcacacatgcttgccggtgtctgtagggtcagaagatggagatgtattccttggaactggaattataggaactgggagctacttgatgtaggtgttaggaacccgacctgggtcttctgcaatagcagtgagtgctcttagctgctgggccatctctccagatctatggagaaagtcttaaatgagatataatatgaatggataaggaccgtaagtcatagttttaataaatcctgttgtttattagtgctgatcttgggtggatcctctaccctttctgaatttcaaattccttctctacaaaatgtagatatttgtgtggcatatgcttgaagtatacatggtatgtgctagaaatagaggaagtcatgcaagggaagctttatctaaatgatctatttgccaagggctcttaaatgctgttatttgattcatagtgaatggccactgggcaagagtgccttcacgctgacagggtaaccaggcatctacattggcgacaatgcctgtttctgtgaccattctgtcaccaactctaagaaagagaaaaatgtccaagaagggacttgaaaggtgggcaaggcgcttgtcttggatctgtgcttagaataccatggctgtggagagagggaggcgagagggtagttcagtgggggagaagacttagcacatccatccatcctcccattccacggaacagggcttatgctagaacacagccatgggttctccacaatccgggcaagcaggagggtcatttgattatgcgtgtgcatagtttaagatgtaactgtgtaatgtgtgtgaaattttaacagctatctgtgcacttagagcttcctctcagaagcaaccatcctccttctatccttccctcccttcttcccttcctcccttgatttctttgtctctgcctgtctctgtatttctgtccctctgtccctctgtttctttctcccctccatctctctgtctccatctccctccccttctccctctacctccccacaccctctctctccctgtatgtgtgtgtgtgtctgtgtgtgtctgtgtgtgtgtgtgtgtgagagagagagagagagagagagagagagagagagagagagctcttttcacgctgttttccccaaatcttctctgtagctttagaaaaatactcctggcctaattcagtcattgtctaataagagtgaatcttggctaattgtacatagaataaagaatgaaagataactgtaagaaaagcaattattttactggttgcatttacgattgtcaaactggtagtgtctgatactgctgttgaccactaaatggatctgagtatgccttatttaagatgggctcgtgagtattctatattacacaccaaagtcattttagtatgagctttcagtgagacatttaatgtgcttttcaaaagaaatctgaataagatcacagagctgttatattaggattaaggggcacttttcttacaaccatttaccagtgttttcttaccaatcacttgacactaatatgatttaaaaaatttttttttcgaaactgaaacaaaaataaataaatggaagtttctcagagttcctccttcctccaagatgtttgactctgagtaactatggaaacagagacatggtaacccacagcattgggcttctggggaaaggaacacagggtcatgtttctctgccagtcacaagaactcggttacacaaaacagaatgatcagagagcatgtgggcccagaaaggaaaaataacatttgtgactttcatgttagaacatgctgtttctagagtgaccaaacatatgcactctgtggctggtgatatcgaaagatacagtttcataccatatctttaccttggagcatcatggttgcttgcagccttgctccagtctctggaatgttggttatttaagttttgcacatgctccttgaaagttgagaaaattttctataggaggaccagcagtctcaattaatctggacccccaagatctctcaaacactggaccaccaaccaggcagtgtacaccagctgatacaagtcctccaacacatatacagcagaggactgccaggtctatgttcattcagagatgatgcacctaaccctcaagagactggaggccccagggagtttagaggtcagatggggtgggggtggggacatccacgtggagacaggggattggggaggagttgtgggatgtggaacagtcagagggtggacggagtgggggaaataaaatatggcgtgtaaaaaaattaattaatttaaaaaaaaaaagagttcagaggcaaaaccaagtgctgatcacctatgtcaagctttgaaagaagaggaagtggtggtttgtcttacaaaatggtgcaaaccccagagttcattgcttcaggtttttctcctttgtggagcttcctgttttgggttttatcttaaccgcctctgacacgaagtgagaaaaaccatcatgagatgtccctctgagataggactgaagcgtttctgtttcacttcatctcttcctcaccagccttttgctgtctgcatcacaaactcgggtggtgctcatgtaagatatggcaagaccacatcctcagacccttacagcccagcatggctcagctttccagagaggacagctatcctggagaacctgatctacagtggtgctcctgcaagcctgcagtgcatgccagcctgctgttgaaactcaagtctttgtggggtcacaaagcattttaaaatgtatgcctgtgactcttctgtcttgctgcccttttatgaacaacctgaagccacattgttgtcttccttatttggccaccacggtgtctggtttctgcccatgacactgtgctgtctccaagtcaccaaattcatgttctttccaagcggtgactctaggataaggtagctgtgagtgcagcagctctctagtatctgtgaacgagagtccagattctggcagttagtgttgtcacagtctcacctacctttgtaagaagagtgcccgttgtagttacttttctatgtattgtcatgacagaataccaaggtaacttacagaagaaagagtccaactttcatatacccatgagactctcgtcaccatcaaagtcatcgaaatatatgttacatccaaagatactttcttcctcttttactatcgtgttattgagtttaataatacttataattccagcacttggggtccagaggcaggcagatccctgtgaattttgaaccagccagggatacacagagagacactgcctcaaaaataaacaccaggatttatttaagtaatttcaagtagacttaagtcgaactagtactagtagactcatagttaactaacagactaatacagttctgagcattgtgttatatgaatttccagagctttttttcctggaataacttcaactttataactttagtcatcactccaaattccccacaatccctcagaccaaatatctgactctgtttctgtgagtatgttagactacagtagctccatctctctgtcaagtttattttacttagaataaagaactcttgagagactagtctacacaggtgagtgtgtggactacagaagctaacagcttctgggacaggcgaaagcaacacagcttctgggacagacccagttttgggctccagacatctgggcaccttccctgccagaggagaggtgtctgccccacctgggagggctttgccagagtacctgggggagccatcttgattcccagatccctcagagactagtctgctcaggtgagagtgtgaactacagaagctaacagcttctgggacagacagaagccacacagcttctggggcagaccctgtttcgggctctagacatctgggcaccttccctgccagagaagaagtgtctgccctgccctggagggctttgtcagagcatctgggggagccatctctggtctgggatctctcagagactatactatgtaggtgagagtgccgactacagaagctacacagcttctgggacaggccctgtttcaggccttcatcttctgccaggaggcaggtccgaatgccagatatctgtgcaccttccctgcaggaggagagcttgcctgcagagagtactctgaccactgaaactcacgagaaatctagtctcccaggtctactgatagaggctaacagaatcactggaggaacaagctctaaccagagacagctataacaactaactccagagattaccagatggctaaaggcaaacgcaagaatcttactaacagaaaccaagaccactcaccatcatcagaacccagcactcccaactcagccagtcctggatacccaacacacccaaaaagctagacccggatttaatgataatgataatgataatgataatgataatgataatggtagaggatgtcaagaagaactttaataactcacttaaagaaatacaggagaacactgctaaagaggtacaagtccttaaagaaaaacaggaaaacacaaccaaacaggtagaaatccttaaagaaaaacaggaaaacacaaccaaacaggtgatggaattgaacaaaaccatacaagacctaaaaagggaagtagacacaataaaaaaaaaaaaatccaaagtgaggtaacgctggggatagaaaccctaggaaagagatctggaaccatagatgcgagcatcagcaacagaatacaagagatggaagagagagtctcaggtgcagaagattccatagagaatatgagcacaacaatcaaagaaaatgcaaaatgcaaaaagatcctaagtcaaaacatccaggaaatccaggacacaatgaggagaccaaacctacaaataataggagtagatgagaatgaagattttcaatttaaagggccagcaaatatcttcaacaaaattatagaagaaaacttcccaaagctaaagaaagagatgcccatgaacatacaagaagcatacagaactccaaatagactggaccagaaaagaaattcctcctgacacataataatcagaacaacaaatgcactaaataaagatagaatattaaaagcagtaagggaaaaaggtcaagtaacatataaaggcagacctattagaattactccagacttttcaccagagactatgaaagccagaagatcctggacagaagttatacagacactaagagaacacaaatgccagcccaggctaggctaatatacccagccaaactttcaattaccatagatggagaaaccaaagtattccatgacaaaaccaaattcacacaatatctttccacgaatccagcccttcaaaggataataacagaaaaaacaaacaaacaaaaaaaaaaaaaaacaaggacggaaactacgccctagaagaagcaagaaagtaatccttcaacaaatctaaaagaagacagccacaagaacagaatgccaaaactaacaacaaaaataatagggagcaacaattacttttccttaatatctcttaatatcaattgactcaattccccaataaaaagacatagactaacagactggctacacaaacaggatccaacattttgctgcttacaggaatcccatctcagggaaaaagacagacagtacctcagagtgaaaggctggaaaacaattttccaagcaaatggtctgaagaaacaagctggagtagccattctaatatcgaataaaatcgacttccaacccaaagttatctaaaaagacaaggagggacacttcatactcatcaaaggtaaaattttccaagaggaactctcaattctgaatatctatgctccaaatgcaagggcagccacattcattaaagaaactttagtaaagctcaaagcacacatacacctcacacaataatagtgggacacttcaacacatcactttcatcaatggacagagcatggaaacaaaaactaaacagggacacagtgaaactaacagaagttatgaaacaaatagatttaacaaatatctacagaacattttatcctaaaacaaaaggatatatcttcttctcagtacctaatggtaccttctccaaaattgaccatataattggtcacaaaacaggcctcaacagatacaaaaatattgatattgtcccatgcatcctatcagatcaccatggactaaggctgaccttcaataacaacataaataatagaaagccaacattcacgtggaaactgaacaacactcttctcaatgataccttggtcaaggaaggaataaagaaagaaattaaggactttttggagtttaatgaaaatgaagccacaacatacccaaacttatgggacacaatgaaagcattcctaagaggaaaactcatacctctgagtgcctccaaaaagaaactagagagagcacacattagcagcttgacaacacacctaaaacgtctagaagaaaaggaagcaaattcacccaagaggagtagaaggcaggaaataatcaaactcaggggtgaaatcaaccaagtggaaacaagaagaactgttcaaagaatcaaccaatcaaggagctggttctttgagaaaatcaacaagatagataaacccttagccagactcactagagggcacagggaaagcatcctaattaacaaaatcagaaatgaaaagggagacataacacatcctgaagaaatccaaaacaccatcagatccttctacaaaaggctatactcaacaaaacgggagaacctggatgaaatgaacaaatttctagacagataccaggtaccaaaattaaatcaggatcagattaatgatctaaacagtcctatatcccctaaagaaatagaagcattatttaatagtctcccaaccacaaaaagcccaggaccagattggtttagtgcagagttctatcagaccttcaaagaagatctaattcaagttcttcacaaactattccacaaaatagaagcagaaggtactctacccaattcattttatgaagccacaattactctgatacctaaagcacagaaagacccaacaaagatagagaacttcagaccaatttcccttatgaatatcgatgcaaaaatactcaataaaattctcgctaaccgaatccaagaacacatcaaaaaaaatcatccatcctgaccaagtaggtttcattccagggatgcagggatggtttaatatatggaaatccatcaatgtaatccactatataaacaaactcaaagacaaaaacccacatgatcatctccctagattcggagaaatcatttgacaaaatcgaacacccattcatgataaaagttctggaaagatcaggaattcgaggcccatacctaaacatgataaaagcaatctacagcaaaccagtagccaacatcaaagtaaatggtgagaaactggaagcaatcccactaaaatcagggactagacaaggctgcccactttttcactacctattcaacattgtacttgaagtcctaactagagcaatttgacatcaaaaggagatcaaggggatacaaattggaaaggaagaagccaaaatatcactttttggagatgatatgatagtatatatgtgactataaagattccaccagagaactcctaaacctgataaacagcttcagtgaagtagctgcatataaaattaactcaaacaagtcaatggccttcctctacacaaaggataaacaggctgagaaagaaattagggaaaccacacccttcacaatagtcacaaatataaaataccttggcgtgactctaactaaggaagtgaaagatctgtatgataagaacttcaagtctctgaagaaagaaattaaagaagatctcagaagatggaaagatctcccatgctcatggattggcaggatcaatatagtaaaagtggctatcttgccaaaagcaatctacagattcaatgcaatccccatcaaaattccaactcaattcttcaacgaattagaaagggcaatttgcaaattcatctggaataacaaaaaacctaggatagcaaaaattcttctcaatgataaaagaacctctgggggaatcaccatgtctgacctaaagctgtatgatagagcaattatgataaaaactgcatggtactggtatagcaacagaaaattagaccaatggaatagaattgaagacctagaaatgaacccacacacctatggtcacttgatctttgacacgggagctaaaaccatccagtggaaaaaaagacagcattttcaacaaatggtgctggcacaactggcgtttaacatgcagaatatgaattgatccattcctatctccttgtactaaggtcaaatctaagtggatcaaggaactccacataaaactagagacagtgaaacttctagaggagaaagtagggaaaaccctcaaagatatgggtacaggggaaagattcctgaatagaacagcaatggcttgtgctgtaagatcgagaatgggcaaatgggacctcataaaattgcaaagcttctgcagggcaaaagacaccatcaataagacaaaaaggccaccaacagattgggaaaggatctttaccaatcctaagtcagataggggactaatatccaatatatataaagaactcaagaaggtggactccagaaaatcaaataacaccattaaaaaatgggggtcagagctaaacaagaattctcacctgaggaataccgaatggctgagaagcacctgaaaaaatgttcagcatccttaatcatcagggaaatgcaaatcaaaacaaccctgaggttccacctcacaccagtcagaatggctaagatcaaaaattcaggtgacagcagatgctggcgaggatgtggagaaaggggaacactcctccattgttggtgggattgcaagcttgtacaaccactctggaaatcagtctggcggtttctcagaaaattggacatagtactaccggaggatcccgcaatacctctcctgggtatatatccagaagatgacccaaccggtaagaaggacacatgctccaccatgttcatagcagccttatttataatagccagaagctggaaagaactcagatgtccctcaacagaggaatggatacaaaaaatgtggtacatttacacaatggagtactactcagctattaaaaagaatgaattgatgaaattcctaggcaaatggatggacctggagggtattatcctgagtgaggtaacccaataacaaaagaactcaaatgatatgtactctctgataagtggatattagcccagaaacttagaatacccaagatacaagatacaatttgcaaagcacatgaaactcaagaagaacgaagaccaaagtgtggacactttgccccttcttagaattgggaacaaaacacccatggaaggagttacagagacaaagtttggagctgaggcgaaaggatagaccatctagagactgccattcctggggatccttaatcagtctccaaacgctgacaccattgcatacaacagcaagattttgctgaaaggaccctgatatagctgtctcttgtgaggctatgccggggcctggcaaacacagaaatggatgctcacagtcagctattggatggaacatagggcccccaatggaggagctagagaaagtacccaaggagctaaagggatctgcaaccctataggtggaacaacaatatgaactgaccagtaccccccagagctcgtgtctttagctgcatatgtatcagaagatgacctagtcggccatcactgggaagggaggccccttggttttgtaaattttatatgcctcaatacaggggaatgtcacgtcaagaagtgggagtgggtgggtaggggggtgagtgtgtgtgtgtggggaagggtctgggggacttttgggatagcatttgaaatgtaagtgaaaaaatacctaattaaaaaaataaatttaaaaaatacaaaacaaaaaacatatatatcatccccatgaatttgcaataaagcaatttgattccaaaaaataaataaataaataaaaacctcttggtctatctataacatcactctggtggtttgaatgaaaatgactcccataggctcagagagagtggcaccacaaggaggtatatccttgttgaagtaggtgtggccttattgttgaagaagtgtgtcactgggggtgggcttcgaggtttcagatgctcaagttagggaaagttccttctctctcttcctgctgtttgctgatctggacacagaactctcagctctctctccagcatcatgtctacctgcatactgccatgctttctgccatgtgatgatggactaaacctgtgaacctgtaagccggccccagttaaatgctttcttttataagatttgccatggtcatagtgtctgtgtctcctcacaataggaaagtccactaagacaatctcacactttttaatgactgcttctatttctttagtggctatggtgctgtttaaatagtttacctgatcttgatttaactttggtaagtggcgtctgtctagaaaattgtccattttgttaaaatttttccaattttgtggagtacaagcttttgaagtaagacctaatgattctttcaattccttcagtgtcagttattacatctcccttttcattactgagttgcccaatttccatgaatttgtaggcttttcagtatttctgttgttgttgaagttcagttttaatccattgtggtctgataagatacaaggcattatttcaattttcttgtatctgttgaggctttctttgtgaccgactatatagtcaatattagagaaagatccatgaggggctgagaagaaggctttttcttttgtgtttgggtgaaatattctatagctgtctgttaggcccatttaattcataatgtctgttagtttcattattactctgtttagtttttgtctggatatcctgtcagttgaaagtgaggtattgcagtcttccactactaatgtgttgggttcaatgtgcaatttaagctttagcaatgtttctcttacaaatatgggttccccttgtgtttgggacataaatgttcagaatttagatattatcttggtagatttttcctttgatgaatattaagtgtccttccccatctcttttgatttattttggttgaaagtctattttatcagatattagaatggctattgcagcttgcttctgggtctgtttgcttagacaactttttttccagccctttgctctgaggtaatggctatctttattattcaggtgtattacttgtgtgcaacggagtgatgggtcctgatttcacatctattctgttagcccgtgtctcttttggggggtagggaggattgagttcactggtgttgaaaaatattaatgaccagtgattgttatttcctgttgttttgatgttagtagtgtttgtgtgtgtatgtgtgtgtttccttggttttgctggtatggaattccttatttcctgtgttttcttaggtgtagttatccttcttgggttggagttttcattctagtattttctgtagggttggatttataaatagatattgtttgaatttgaatttttcttgaaatatcttgttttctccatctatggtgcttgagagttttgctgggtgattgagagttttgtctaggtgggcagccatagttttttagaggttgcaagacatctgtctaggccctttctagcttttacagtttctgttaagatgtatggtgcaattctgataggcctgcctttgtgtgttacctggcctttcccccttgctgctttctaacatctttctttgttctgtagattttgtgttttgatcattttacaacaggaggtttttctttctagtccagtctaattggtgttctataaccttcttgtatatttataggcatctctttctttaggttgggaaggttttcttctatgtttttgtcgagaatattttctggtccttggagcttggactcttcacctccttctattcgtattattctaaggttagatcttttcatcatatcccagatttcctggatgttttgtatcaggaattttctcgctttaacattttctttgactgaagtgtcaatatcttctgttgtatcctctatgccagagtccatcttccatctcctatattccgttgttgatgtttctcttcgctaggttttcctctccaggattccctcagtttgtattttctttattgcatctatttctactttcaggtcttgcagttttatttccttcacccatttaattgcattgttgcgctcacctcttctggcaaggaaaaaatgcaacatggtcagattcttctcaacagctttattgcaggaacacctcgatgctacgggaacccagggaggactgcttatatacaccccaacactggggagggctatgtgtcctcctgggattggtcagtctgccggcactttaatttgcatgcacctgcttgggaggggttggcgccagattcaggctagcacctgcacctgcgaagtggcattgtttactgcgcctgtgtactggagacaagcaccatcttttaggcaccagctgcctacattgtattttcctgtatttctttaagggatttattcatttcctccttaaaggcttcaatcatctttataagattggatttaatgtcattttcttatgttttggttatatcctgtagtggggtagtggagtagctgtgctttggagatgtcatattgccctggcttttgttgattgtgctcttccaagggcctttagtcatctgaatggttttggtccctggatgctcttgttgtagtaggtattgggaggagggtgaaccttgatggtcttggcatggcaggcctctgatgggtatggtatcttgagtagtatggttccagacctggagatctgtatggttcaagagcctcagatatgataaaggtgggcagagaggtggcaggagaatggaggtctctcagggctagcaggctactcagagcaccttggcttggcacagagggctcagagatcagggaagataggtgggggaagggaagcttactagtatggttcaagagtctgatggaggtggagaagaggcggtgagagaatggaggtccccctggaatagcttaaaaatgtaaagaatgggctaaccattatgcttaacaaaaactgttctacgaaagaggtttgttggctctagatgttaaatttttaaatgattttttaaaaaatttaccctgatattgtcaatcctcttctcacaattaaacattgccaaaatgtatttgtaattttagttccgaagagcagctgacattattttcaattatgtcatttaaaaataaaattgcaaaagtatagattttgatagcctaattagtgattttgtggaagaaaataagtcagaataatcttatggccaggcaagaggtcactgcactattatttattttattatataaaattattttaaaatattttcttataatttatgttgtttggatttatttttcatgtgtcacaatttattatatttcatgatcaataaaatattttataaggggtagattttacatgttggtattttcatagtaaattttttcttgctttttaagcaaaaggcccccatacaaaccctttttgtggattaggtagctacacagggagcctgctggtatgatctggcagagggagcttttccaagctggtgacagaaatcagggaggggttgccatgttgctcctctggaacttttacttagacaaattaatgttctaacttgttgaataaattattgttgcctcattggttctgtattagcgcttcacatctgaatatccaagcaaattatttgcagtcataaaatgagaagcaaagctgaaattgttttctctgttggcaaatattcttggtacacattctagtatgtgtgttacttggtgggtgttgtcctattttctattacttggtaagtgaagatatgcttggataattgaagatggaattattttactttagaactgtgaaaaatggaatacaatagcaaagatgcagaagaagaaactgaagatgaagaggagggactgaaggaggcggagggggaggaacaggagaaggaggaggtaacagcaacctcagaaacagacgatgaccaagaagacctcccttctgtcttagtgcctacagttaacattcgggaggagcggctcatcaatttagctgaaacaccagctttcctctgtctgcatgaggtatgtttctctttgtatactattactagagtgtcttagttagagttttactgctgtcaacagataccacgaccaaagcaactcttttaaggataacattgaattggggctggcttacagtttcagaggttcagtccattatcatcaaggtgggagcatggcagtgtccaggcagtcatggtgcaggaagaactgagagttctacatcttcatctgaaggcagacaggagaagactggcttctaggcagctaggttgagggtcttaaagcccactcatacagtgacacgcttcctccaataaggccacacctccaaatagtgccactccctgggccaaacgtattcaaaccaccacatagagtaaaacctaatgttcacccacttaaacatacaaagtctgcagcactgtcaaagttctctgttgcacacctcctataggcctcaatcatatgaacaagtggacccagcctttcttcctgacctttccttctgcaccgatgcagtgtgtaggctcctttattattatgttcattaactttttattgattctctgtgatttcacatcatgtaccccaatcccactcacctccctgtttctttgtatctgttctcccccccccttgtaatctcccataccccaaacaaaacaaaacaaaaaaacaataaacaaagacacatcttgttgtggaacaacagaataccctttgtccttatatctttacctggaactgtgcattgcaatgcgtcattggtctggttccaggcctctggcttctactatactgtcaacactggattcttaccaggactcctcagatatcctgttgttgctctgtgtcatggagatcctgcaacttcatgcgttccagcaatccggcagttcatagatggagaagatgttggggtgagcctgggtggtagtgagttggccagccagcagctctccttcacccacgctaccagggtgagctctctagcactgccctttaatgtaagaccacataccaaaagcacaggcattaattctgacagttaataagtgagacgtcaggaagctaagcagaagcttctctgatgagggctgagtgatgacttaagtactggtatagggtaggccagcaggagttggtcacttggttaaaagatggtacttttaggtttctcccctatttactatcattgctttctttttgatattgacaaaaaactaatatagagattttaggcttagatttttcaaaaaaaaaaaaaacaacctccttttaataagggtctcaaatgcttcccccacttctagcccaccatccaaaggtatgggagaaaagatgataaataggacaagggatgtggatctttttagaagttgttctttggggaaattccaatctctgtttgtgaggataccaacagtctagttcagtagtctcaggatataccaaacgtgaatcagcaacggtggtatgatccagcagaaaccacaagagtcagtgggagagactaggaccagctgggatgccaggagaagttctctgaacctttcttaatgaagtgaagatcagtgaaggagaaagcaaagaaagatgcaagaccaacaaaacattgcagggccagctatgcaagcacctcactgtccgcggaatccatttatactctcagcaaatatcacatgtcctctcaggagccttgccttaataaaacactatgtgagtctgcaagacatgatgtatccagaaacttccacattaggagatactaaagactatacatgcatcttattcaccctaaaattttgatctatttttgatatccattgaggattcatacataattactcttatgtcagttgctccatcatggtatctgattccatcattctttccgcacctgtgagtatttttgctgctgctatgctgtatgattgattgaatccaggatgtctcacatcctaggcaagcattctcctgtatcttcaactcaaacgcacatttttgtttcagataggtctctttgttttgctcaaactggtttcacacccctggattaaagtgacccttctgcagcagtcttttgagtgctaggactatagatccacatcaccgagcctagttcttcaacagctgtattaagtggctttccatatatataaagaacccttaccactttctgacttacttatttgtctacattcaacttaatggagaaagaattcattaaggtgcagtagtggggcaggaacacgagacagctggccacatcacagccatagccaggaatcagagagcagcgaatgcttgtgttcagctcactttttccttttcatgcagttcgggatcgtagcacagggaatgacaccacacacacacagtgtgtatatgtgtgtgtatatgtatatatatatcataattgttagctatagttttatttctcaattcttttttataatttttaaaaaagatttgtggggatttaaaaatttttgcgtttagtttttcttcagttgtttaaatagaagctgtgtctgaagaacggtagattttggatcccagctgaaagaaagctctcgggaccagctgccaaacatggacacttccatgacactgaaaatacagaagcacccacagatgtactgttgctagcgctgggcctaccattggcctgcagtgctgatcggcagagcgcacagctttcactgtcatcagacattggctgaagtgtgtgtttagtgtggtgttcaaggtcctctgcaaattagaaccagactatttttcaatttaatcattcacttaggccttaatggcctatttacattggttctcttagtggagactttctgaaatctagaggtggtaaattcagaagcctgggaaattaaaatatgtgatgtaagagcatttcccaaaattccgcctactcacactgccacataaaatctgtgccatttcaacttagactccaaatgaggccctccttcggtagaccatactttgtcaccctagcaagtatcctaaccttctgaaccttcctgaaccctcacttcttcaggacactgcctgagcacttagcttgtgggaatgtctctagattgccaactctgtagcattaataggtggacattacctggttcttagtcaataaccaatatttactaaatatcttctcataaggcactgcacagaaaacttaaaagttcctctctgatattatgactacataataagatcatcgaggcaggaactaccctgctaagcaggatcagtgttcaaaatgacatttgggagttgagccatttgggtccatcagtggcctgtgagctaaggtggacagatagctgtctatccactaatccactgatatataagcatgaggtctggtgctctacaaacttttctgtcccattggaaagttgtctgctttatatatgtttatgtatagcatatataaagtataactcataagtatcagtatgctgctccttgaatcttaagatgctatacagccagcacacatggatcagaatttgttaaggctccaaattttgcttcccttctgagttctcagtgtcagtttgagagttaactgtgcactttaaatggccctgaatttatcttttttccaccatcatgttcttgaccagatcaaagtatatttctagcaacctagaagcttctctgggacccttctcaggtgtcactcccaccaaaggcagcccatgttcagagttgccactcactctgttggttagcgtcttcctaaacactgtgcacatagaatcatatgccatgtttttgaccaggcatcctgtttgtcattgaatgtgtgagattcattaataacactttgtgtaaaaacagaacgaccctttgtttatactcctgcatggtaactgtctttttttcctcaggaattggtgtgtgcctaaacgtgaggctgctatgtcatagaggaagtttataagcagcccaccggagtttttcctggggtgggctcaaccttagatgttgcaatgcatgcgtggttaaacctgtttctgtctgtgtgcactgaccctgactatgagtgtcatggtgtcgggtgtttcactctggcaaaatctagaagctataaaacacttcatctcaattccacaagcacaaaattcattttgagtattattttattttgcctgcctccctgattattctcttatcagacaccagtcagctccttcttcctcctttctttgcaaataatccttatgccaacagttaagcttttgacacagcagagccaagtgctagagaacaggaagcactaccctgattaggaggcccaagggagaatacacagactgcaatcaagtactaccgatggagtgtgtcaggatagcagacagagccctgttagctggggagtgcgggtgagtggcattctgtgggtgagtgagttaataggcttccctttgttggtaaaatgaccctccctagagcttgttttgtattaagctatccattgctttacttcctacaaaatgtataatgaataaagtgtttatagcaaggttttgtaaatatcttttaaaattctttatttatcacagtgggaaatggtttccacagttgtcttcaggaccaacacttcccaacaagaaactcgctgccacggtcttgttactggctcttttcccagctgcattggaaaagtttcttcactttgcctttcaccttttaacaaactaaaatataatataaaacaaaattcaacatattcaaagttggactagccaaggcaaccgaaaaatataagagccccacgagaaggcccaggaaccagccacccacttgtttacaggttccagggtcccataaaggcactatatggaaagctatagtatatatgcagaggacctggtgcacacgtgtacaggccctgtggcctgcttgagtctttataagttcatatgagctttgctcagttgatttagaaggccttgtttcctaggatcttccttcccctctgcctccccaactccttctgcctcctcttccctggggttccctgagctctgagagggggagttttaatggagacatctcatttggagctgtgtgttccaaggtcctctctgtactatagagccatgggcctctctctctctctctctctctttctctctctctctctctctcatctgctcccgtctgctgcaggaggaagcctctgtgatgctgagagcaaggcactgatctacgagtccagcagaatgtcattttattaatactttatttttttttttagaccagtactatatggtgttgccctaggtttctgggatatttagactctagctcctcatcatccaagcagtaccaagtatgggttctatttcatggagtgggccttgagtcaaattgttactcccacaagctttgtgctaccgctgccctagcatactttgcaagcaggacagattgtggaacaaaggtttggtggttgggttggtgcattttacgcttctcctttgggagcttgcagagtacctttccatgtcagaaatgatagaatacagggtaaaggttctgtatcgacaatccttaacctccccatggtctgtgagctgtgtgagtgttcccttcagcaaagaggcttgctgtcagtttgtagagagcaacctattgtcttggcaacagtctgagttgtttggggatttccatgggaccctttctgtcaacaacacaagcgaatgaacccctgtccctgtagctgaagctttagttggtaccaagggatggatagccatctccctctccctcgttatttggcggcttcatgaggattgccttcatctatcatcggaagtttccactgtgctaggtttccatactgcctgcccctcaaatgcccttcagttccttcctctccctcatccccttcctcaatcccatcttcctttcacctttctttcctacctgctactcacattctcatcccctgacccccagctccagtccactcataaaatctgttctatttccccatgctgggagatccgcatttgctctctagtccctttgtctatgcctaacttctctaggtctgtggattatagcttggttatcatttatttatggctaatatccagattaagtgaatatataccatatctgtcttcctgggtctagtttaacctcactcagggtgatgtttttctaatttcatctatttgcctgcaaatttcatgatgttatcttttaaagtgccgagtaaatactgagttttgtaaatgaacgttttctttatccatgcttctcttgagggacatctacattgtttatgatttctggctgttatgattagaacagcaatgaacatggttgagcaaatgtctttgtggtaggatgaagtgtcctgtgggtacatgccggagagtggcgcacaggtggatcgtgaagtagatctattcccgtctttctgaggaaccaccatattgatttccaaagtgactatacaaattgtactcccaccagcaatgaagaaatgctccccttgttccacatcctcaccagcatgagctatcacgtgtatttttgatcttagctgttctgactggtgtaacatagaatctcagagtcattttgatttgcatttctctgatatctaagaatgttgaacacttttaaaagtgtttctcagccatttgagattctgccgttgagaattctctgtttagatctgtaccccatttttaaattgggttatttttatatcaagtttcctgagttctttatatattttggatattagccctctatgagatgtgtagctggcaaaagagtcttcccattcagtaggccgccgctttgtccaaatgacagtgtcctttgccttacaaaagcttctcagtttaacaaattttagttgaatgatacattggctaggaattgagataacaaaacaattatcttaatctacttagagatatttatatactgcccactgcataccagtatgctgataggaaatgtttattactgttattattaaagctacaaaatcattcctttatttttttagttctcttttaaggattaaaagaattatttatgtatatacatgcaagcctgtgtatgtgtatgccacatgtatgtatgtatgttcataagaggccagaagaggnnnnnnnnnnnnnnnnnnnnnnnnnnnnnnnnnnnnnnnnnnnnnnnnnnnnnnnnnnnnnnnnnnnnnnnnnnnnnnnnnnnnnnnnnnnnnnnnnnnnnnnnnnnnnnnnnnnnnnnnnnnnnnnnnnnnnnnnnnnnnnnnnnnnnnnnnnnnnnnnnnnnnnnnnnnnnnnnnnnnnnnccctatggagctggagttagaagcggtgtgaggaacccaatgtgagtgctaggactgggatcctctggagagcagcaaatactgccagcctctccacctctccagggaggccacctctccagcccctgtttagtttaattctctccctctctctctctctctctctctctcttttttaacggggctgatgactgagctcaggaccttctacttgccaagtaagtgcttttcagttgaactaaatgtccagcttccttcctttgttttaatgttctcttctctccccccccccccccccccgttgctaaagacaaagtacagggtcctgagcttgcttggcaagtgctctgccactgagctcaggctccagcctccctccttcttttcaaacagtccctgtgtgttttctgtgctaaacaccatcgggcgcacagacagaaagcccagggaatattcctgtcctttgcaaggtttatttgggaaaaggtaacttgaaatgttaaatgccaacaaagggtgacgtatggttacagagccagaaggggcagttttcttagaagtcactgtgggaagagatgatggagaaagggttttgaagtcagtagacgtaagacgagcggagataaatcagctctacctttgaactttgccctcactgttcacacacgtacttggcacatctccagggtccaaggcgcttcagagcaaacttccgaggacgcctttggcattctcccaagcctggctctcctgcattgtcctttggctctcttgtgaatgttttgtctggccactgagacaagacacacgaggctacaccaaggcaggtgtggtgggcaaaaggagtgagcttgtttaggagagacactaagaaggtaaaattctggacttcttatctgtatagatggggataagggaagaaccgaacttggcattcggaatgctgaactaggaaactgtctaaattattgggccagaagtgctggagttaagaaaacaccacagatataagaggagtgtctggtgtgtggattgaagcttgcaaacagtccctgactagagggacaggtgtagttagttcttgatccgtgctttgtagaaggactacagtttgctacttcagtgtgtctaacagggacgtctgcattgtggggatgaagtgatattgtcattgtgtatatggttctgtgcttcacaaatggttgcttttacacaaaggatagtttttatacattctgttctccggaggctggatccagataagtacattcggaagttttcattgatttctaaaatcatcatcatcatcgtcatcatcgtcctcctcctcatcatcatcgtagcagcagcagcagcagcagcagcagcagcagtagtagtattttgggactctctgggactaccagtgcttcacccattttctgggttcaccatctctgtagctttactgatgagattcatgatacaatccctaaaaaaatttaaaaataattttcaaatagccaaaatatctttttcttgttttatgccttaattaataaattagctagttgtaagcaggtaaagatatgactctcacccacaatgagcttattgtcaaaggagtgttaaatgtatgatttattttcctatggattctgatatgtcatcactaccatcctacagctgtagcttgtccgtggttacatacatgcacacgatgaggaaggaagcctgtgttccatgtcttaccttagcacttagacttgacatcactcatgattcacactgtaaacactactattttaggattttacaaatttacttttaaaataaatactgtataaatggaaaagataaatgtgtaatgttcttgttatatgtttctaatccctttcccttttttagttgtgacacctcactaatagtcatacttgaaggatgtgagtgttttttaatgtactagtttcctttctaaaatctttctgtaaatatcggtattgccggcatgttttcactttccatcaaacatccaggcagcctcacaaaagcaacttaagactttatgtatctggtaagaaattttaagcagacatgaattcaccacactctattgactactctggtagaggtggttttgctgcgttgttgttgttgctgctgctgctgctgcttttacatttgacagtaggatggagattttaaatgatttccattacagaagaagaatttgggatgaagcaggaaagcacttcaggatttagatatcagcacagcttgtgtccactcttaaggataatttgcattagcattatacaggccctattgctccttataaagcacattgctacctccaaatccagtcagtaaagtgtacactacagaacagggccaggaaaaagaaggtccctcgtgaggtggcctcactcttggcacctataaaatgattacacgaagactggctctggccaggaatttaggctgttatcagaaaaacaatctggaaaaaacaacctgattaaaaatgagcaagtgggagtcaaaatatcagtaaaaatcagggcaggcaggactcagcatttcctcccatcctccccgaactgctatgttacttcctcacacttaacatcttccctgagcatctacagtgagccctgcccaagaataagacacagggaaggatgctggccaccatatggcccccatcagcatggattgttttcctctcctttgctttatctgtgccttgatgtttccttacataatttaagcttcccatgtgtgtgtgtgtgtgtgtgtgtgtgtgtgtgtgtatactggtgtgcatgtttttaagttcaatagttttttttgttacctctaatttttattggtattttatctgtaataagaacttggttgaacattaaaaataatttccttgctgggtggtggtataatgcgataatccatctactagggaggcagagacagaaggttcgtgttcacaaccaccctggccaatttaagaagatcctgtgtcaaagtactatagctcagtgttaggatgcatgattgtatgcagtcctgggttccaacctcaggcttgaaggaaaggactttaaacttgaattctgtggggattttgttggtttttttgtttgtttgtttgttttagtagttattgtaaacagatactgcttttaaaaataaggaataggaaaaataatctatgcaattattctctcccttaatgaaagaaattctaagttggctttggaaagctatcacactctgacaatgtatatctcgtgtaccattagaaccacatattgggaactgaagatggagtcttaagaattgaaatcaagaaaacccctttcaattaaaatatatgaactggacaatgagaaagcattggcgtccttaggtaggaccttaggcaataagcaaataagagtagggtggggaacgtggccatctggtaaccacatttacagatgacactagttaaatgagtcaataccagaagagagtgtaagacaaagctgtcagtctgcacaacaaggcagggttcagtggctgagcagaagatggacccagacgaggtctttagagagcatagtattagaagcctcattataaagtgtgtctcagtcaagaggttaaccttttcaactaaaaccaatctttaacttctaaaatatgcacattgcattaaattcagaaggctcaaaaccatacacaatgaagttagctgtcaggagcaatctaagaaaggctaaggctagcaggtggtcttcctggaggtggcctgcccttttttgcatagcctaagatagatgagctctgagaggcaaggtcccaagaaacttctcctcaggattgcttcttgttgctggtacattttcctattactatcacatagcctctggattcctggcctcaggccacactgttggacagatctcctgcagatcaacatagagatgaactttgatgaattaatgctgtttagataaattagtgattttatagagttcttgatttgatttaaatacttttaggaagaaagcattaatagatgttttggttgtttgctagaaagatgtaacaaagttagaatccagaatagaatgtgcctgcttctcatacagtaagtaaaggctgcataataagactacaatgagctttcatactacactaaaaggagaggtgggtgtgggacgaatttgtgttcaaggaaaagcatttggattcaaggatgaagccacaggtgtgcaccatgataaggtaagggcatgtgaaaactgttgctttgaacttaaaatgagcttacagaaggaaacagggctctgaacttttagtatcaacattcttttgttactcctgttttgtataacatcttatctggggtaattttctaagaactttgtctataaaaagtccagagaaaagaaataaagatgatgggtagtttgtgggggctctactccatccatccatccaaatgtatatctgtctgtatatgtatatatatatatatatatatatatatatatatatatatagatgtagatgtagatgtagatgtagatgtagatgtagatgtagatgtagatgtagatgtagatgtagatgtagatgtatatatgtatatatgtatatatatgtatatatgtatatatgtatatatatgtatatatatgtatatatatgtatatatatgtatatatatatgtatatatatgtatatatatgtatatatatacactgaagagttaaaagaggtcagaatttcttgctggacatcctcaccagccacagataagttttgttccatcagaagtattgacccaataaattgcccagtcactgtcaccagacctcatttgctcccattatctgcctttcagacctggaaaccctatagatgctgggaaagtcactgtaagtcagcctactaccccattccactatctgaaggccacccctcagagcagtcttgggccatcctttatatagatagcataacaggaagtctatgcacaaagaaggaaatggtattctaatagccacacttgcattttacatatacaaatttatttttgtattattttatggttcaaatagtattcagtataacattttaggtagttctctgtcttgagagttttggtcattttcaatcttcatgtttcaattagacacaataataaatcaaataactccgttcaaaccattttacactgggattatcagattgaaaggataaatacctaacagtgggttgccgggtcagtgggtttatttatttttgaatctttatgattcaaattttttaagtttatagtagtgctgagtatactcttgcttcacaaggcatcttctgggacatttcctgttgtcactaatattaattggggtttttaaccccaccttagattatttacctcccagaaaaaaggcacaaaaacttctaaatttataataagtcttagacgacactagagctggcagatatctagcctctacgctattagtatctacacccctatcaataaccctgagttataacttgccatgttccacctgggccactctttcttcaattggccagccctcatggctatgttttcatgactcactcaccccacttacgtctttccactttctccctccttctcctcttgtgtctcagaccccaagcccaagaatcgaaattctacctacctcttttctgcccagctataggccgtaggcctctttattcaaccaatagttttaaattaaggagtaagtttacatatcatatcttggtatacatgaggatttcctggtgcctggaggcaaccagaccttgggggccagtatttatcattacagttcatagcaacagaccaagtctcagcaatttccaccaacaaaactgaaactgtgtgttcattaaatagtgaacttcctcttcctatagtcactggcagctacctctctgtctctcttctctctgtgcgtgtgctgcttctgggagtggaatcacagaccgtttctcttttcgtagctggtttacttcacttaacttggtgtcattaaggttcacccatgctggagccagtgccagaatttcctaagactaacaatgccttgtatgattatcagtgaacgtgttatcttctctggacatgatatacaaatatctctccaagatctcatttttaaaacatttcaaacattgtattatatatccagaaatggaagtgctggattatagtctgtgtacttaaaatgtgtcttcattgtcgagatgccttgtctaatgattgtaacaatttacaactgcaaatgggtcccccatattccaactgcaatgcttctttttaatatatatttttttatttttgagatgatagtacaattacatcatctctccattctctccccgccccaagccctccaatgttctccccctttcgctctttcaaattcatggcctttttttttttttttgcctttgttacattgtatgtgtgtgtgtgtgcgcgtgtgtgtgatttttgtcatagtccttatatttaccttgaagtgagtggaatggaccttttgtttatatatcagactattctgaaagagagcatataaggcttgagatgtagctcaattagcagagtggttgcctaacatgcataagccctgggttcagtactgggtatatctggcacaatcacacataactgtctaatcccagcatttgggaggtagaggcaggagggacaggtgtttaaggtcatcctttgcttcttagaaaacttgaggccagcctggactaaatgagatctgtgtgtgtgtgtgtgtgtgtgtgtgtgtgtgtgttaacatattaataggaaaactgaagtatggaaaggccaagcaatcaggagctgagcagcacaatcaccacagacattttactactcacagtttctaagaggatggcgccatgtcataaggttgggtaggggtcgggggcagagtatgagggtaagtcaggaagcagatgggaaggaaggactgggaaagaaactttattgtggcttctgagctagggaacaggcgagacagggtgagcagactcttaggacagccggtttgaataatctccgtgggttctggggtgttgtgtgcaggccctggttgtctagtgtctggctctgaggtacttagagcaggtagggtgtataccctggattagttgggttgcatttgaaatgtgtgactcggaggagattcgggggtcaaagggaggaagaaatgagagaagaaggaagctaggtgactcaggcatatcatggttatcagcgtgtacagatgaaatgcagccacctcatgcacaccggacagatatgacgcatcagcttcgtagaaattagacatgtggttaatgtggaggcacatttgtgcttcgttgtgtctgtgtgtgtgctttcttaacattctactgcccattggttggcttgaattcttcttatacattcataagaattctttgtatttatatattacgaaggctgtctcgactagtgtgcattcttctagtttatcgaataattgtttttagcttgctcctcgttgtttattccctgtgtggaaattcatctttcaatgtgcttggatcaatctatcgtttctttgcagctctgggattttgttatactttgaaagacctttgttactctgaggctatgtatttgtttcctgtgttttctcatgataccatgaagatctgagtcatattttaacctttgccccatctggtagagtcggtgtggtggcaaacaggaacagcttagaacccaaggccaagtccattatcctctgtacgaaagtactgttcctattcctgcccacgtcaatcaattggaggcaaacagggacacctcggtcggggaaaaatattagtgggagggcagaagaatcagctggtattaaccctcagaatcagaagatagtgttgctacctgtaatgggaacaactgcacgggcaggctttgaacagcttaaatcttaataatctgatggggaacgatcagttggtgataaggtggctagacagagctgctcttagttccagctctgtgtgctagttgtcaggcagtcgtttaggttctctgggccttgatttagatcattgatacagtttttcagttcaagttccttcttcacggtggcctcattgcttactgcggtaatgcccatcatttctggattcttttggtcttttctctcctcccccatagaattcatatataagtactctctgtattcacgtcaccatcagccctgccccccatcactatcagcccctcccccaccaccatcaccatcagcccctccccctccatatcactatcaacctatccctctctcccctgctccctccagagggaccactgggagaaaccttgcataggctatgtgtgtgtgaattgcttacaactcaacattttccttcactggccttgatacacagcagggtgtggagggtatgtagattcccctgcagaaagccttgaaaagccttgtgctaaggtgtcccctcaggtaaagaaggcgtgagttccacggctcctcctgtgcaaaactccctaaaattcctcatcagcacgggtgtctctccgcatccccctcagacctgtttgaggagctccagatgctgcctccccgccttgctttctggctccacccatctccccttgatgtctttggccacttcactgttttcccacccagcatcccgtggtcctttccgggtccaggcatagacatgaggaactgagggcagcaggaggaggttgtaaatacttaaagttgaagcttcttttgcttgagcattaagatcgccacttcctggtcctcaacagtcaaatccctcagcaacccgatctacggttccttctgtccttctgttcctgtgcccacacacttcctgcgttccagaacacacttgcacagcccggcttgctcctgtttgcctacaagctcaggattccccacttcactgttgcctttctcttctcctcttgccctaaaagcaggcccgtacttcagagcagccgtttttcaaggccatctggggtcccaggttttgttttttgttttttgttttttttctcaaagtatcttccttctgagcagagctggaccttggctccttctgtaacctcgcccctgctgggctgccttgtctcccacccacttctcttttctgttcttaaagctaatctgaagtggctttggaaaagtgagagagcaggaagcaatcagtgttccttgcaaactctacctgcttggtgtataactgtgataggtttcagaagagcacccacacacgatcatcacttttaaaagcaaatgaaaaatggagagacttcttccatctctgaatgctgtttccataggaaagcaacccatgttctccgtgatttaaaccttttcagttagaaccatcacacagctgtcctattttactttacccgctgacccaaccccgccaggaaaatgtgatagaggaatgcttgtcaagtgtttttttctcagtgaaattaaatcccccccaggtcgagaaaggctgcactattccagctggcacaggctacagatctgctcaacttcactaaccctgctctctttgacacccttgacatgtctgcagatggatggggccattgcagacacgttgagaacctctacccaaggtcagcatgttagacaccagcccatatccagagtgaaggtgtctgtcctgttcaacctgcacagatccccacatccacagggtccctctgggtgggtttctaatagttggatgaacagggttttaaaaattgtccgaatgtctggagctgtggctcatcaagtaagaacactgcctgctcttccagaggaggtgggcacagttccctgcacccgtgtgtaggctctcaatcctctgtatctccaggcctaggacatacaacaccctcttctggcccccaggagcactacatacgtgtgtgtgtgtgtgtgtgtgtgtgtgtgtatgtgtgtgtcacacacacattcaagcagacccttatatatataaaatacaaataaattaaacctcaaaaaatttcctcaaatagggtagaaaattttttttaaagaaaccctcactaataccatttatttttcagtgaaatgctttataaaacttgtttttaacagatgaaaataagaactttggcatttgcatgagaagactttcggctttcagatatcttgcaaagtactttgtgtttgtgcagaatgtgtctccagtgaatcctgccacgtaaccatggagcaagtagtgtttggacagcgtgaggacttgtttgccttttctgtcagcaccgtcataaatttgacttagcctcaggaagacaggatttaaccgctgggttaagtaggaacattaacacccttgaaaatacgttgatttaaaaatatctcctgtctaaaacattatatgatagttttgataagtttaatagtataaataatttcagctcagacaagatataattagaatttgttttcctttttctaagttttaaaacaaagtcagatgaggaatggtaatgagggttactgcatgaccttttccatggagaattagacacttcataagaaattcaccaggaatgtcaggaaagctgaaatgaaggctggcctgaaaatgactgacagttggtaggtaacatccctccaagggaaaagggtcggggaggggaggagnnnnnnnnnnnnnnnnnnnnnnnnnnnnnnnnnnnnnnnnnnnnnnnnnnnnnnnnnnnnnnnnnnnnnnnnnnnnnnnnnnnnnnnnnnnnnnnnnnnnnnnnnnnnnnnnnnnnnnnnnnnnnnnnnnnnnnnnnnnnnnnnnnnnnnnnnnnnnnnnnnnnnnnnnnnnnnnnnnnnnnnnnnnnnnagggagagagaggagaggagagagagaatgagagtcagttgagtgttgtgtgagagtgtgtgtgagtgagtgaggagtgagagaatgagagtcagttgagtgttgtgtgagagtgtgtgtgagtgagtgagtgtgtgtgaatgagtgtgagtgagtgcgtatgtgagaatgtgtgagtatgtgtgtgtgtgagtgtgtatatgtgagtgtgtgtgtgtatgtgagaatgtgtgagtatgtgtgtgagagtgtatatgtgagtgtgtgtgtgtgtaaagcactgtctccttgggcagtactcaccacagcaaacagaacacactggaagtgtcctgggagagtgtccagtgcaggatttttgaactgccagtcagattcattcgttgtcctctccattgcagtattagtactatggaaggggctagaagttgaatttaggctgcccctcatgtggaaagtgtttataaaacacttgtgaaatagttaattatcactattatctctaaaatggagaaagggaataaaactagtgcagttaaactattcataatcatagccaagctgtaccccagtgatactaaattatttggcaagctagatagaatgttgttaacaagcttggaggccttttctatgaggttcagttcttgcttcttttgagctctgcctaacgtttggctgtgggtccctgcatctgtttctgtcggaggccagatgaagcctctaatgatgattatactaggatccagtctacaagtatcattaagaatcatttcattgatttttttttttttgccagctgtgtctggttctctcctagatctgtgggctatccagtgcccagcatggacttcctcccatggtgtgggtctcaagttggacagtcattggttggccactctcacaagttctgcatcactttgccccagcacatcttgcagacaggacagactgtgggatgaaagttttgaggctgggttggtatcccagtccctgccctccaaccctcacctggtatcaaaggatgaccgatttaagctccgtatcccccattcctaggagtcttcgctaggctcaccctcagattcctgggagtttccattgcactaagtctctaccgcacccctgaatgctctccactacacctgtctctcccagtacaaaatttgtatagtgtagaattccatggtgaaacactaaactcttttttaagacagcaattcatttaacaaaagaacactgctaataccatatgatacctaagacatgcagcaagactgaaacactaaactcttttttaagacagcaattcatttaacaaaagaacactgctaataccatatgatacctaagacatgcagcaagactcacaagaaagcacttttgctggcacgagaagcaaatctgaaactatgattatctgggacacatatgcagttgttccagtgggagtaaaattctgcactctaatatagacacatccctgagatctctctggtgtgattttaagatggtggtatcctggtttctccttatttccaacctctctgtgaggtaaattggtccaggctcctgcagaaaagtttgtgttctatgtctacttatatatgtttatcttttatggtcccagggttcattacatctgtgatgagcagttctcaaatgcatttgtgaaccccaggtgccctcccccaactccagactaagccaatggcagtctctgcttgcaaatatttgaagtccactttctaagcttctggttccatcactcactctgccccgcttcttacacactcctcagacagattccctctgcagatgacgtcctagttcagtcagtgacagcaccatctttcaaggtcactcagtctgagatactgtagttggccggggctcctctatttgtgttttactatccaccactgacttagctgatcaaatcttgtgagctctacctcagaacgcatggatctcactgcgactgctgaagttagtgctctcaccatctctccatgggattactgtaagcactatcatcctggaaacccctgtgtccatggcaagacagccttccatttctaactggaggagatgatggccctcctctgtagacagccattggtctcctgtctgctcagaatgaacggcatccctgggtataaggttcaggaggcctaagtgccgtggccccaccctctgctcccctgcagacctttctgctttctgcttgccctactttcttgaccccagcagactagactctgcttaccacacacgggtcccttcactgactctcacatgtgccagttgctctccaactccaaactttgatgcttcttgctcccttggcttggcacttgctttcctcaggcattttctcaggtttccactctgttgtttacagatctgtttatctgttgtcatcacagagcggtctctcctctgtgccctgtactcattagcttctctgaggtctcccctctggaacctgtattaattagcttcacttcctctaatagtctcttacacttgcttgctttttttgtcatgaaagtttctcctggttgaaagtcagaatgcagggtctatccctgtggtcagaggtgtgcctccatcctccaagaagactttctggagcacagtacaagtgtctgctaaatgaattaaggcaaaccacacacacacagacacacacacacacacacacacacacacacacacacacacacttcctatctctataagtatttggtttttaagacatttctggcttcctagctttagtaacataagcagctattgaatgttggtttattttaattaggtgggcaaactattatagccaaacatttgtctttgagtttgaatgactaatctttggtgtgctaaaacccaccagtaacactagtgatagaagagaccgagttaaaagctacaaagggaaactgaaaatgctgcctgagggtgggtccccagcagtctaaaggaaatagatgatggtgtcctctatttgccttgcttattattatataaagaaataatactcagtgtttttaaggactcggggatgttatctagattaggtaaacacaacccaaccttttagacagtaacagatatataaatatcattttacacatgctgtttccacatcgaaggatagatataaagattaaatcttttattttacaaggctttaaagaaacattaaacataaccttaattatacatcaatgaaaataaatcttaaacaagagttcatggaaattgcatatatccacctatcttgaaaacttatcgaagagtgaggggcagctactgaaaaatccaggtccagcccatcctgggattctaatgctccttgagcctcgcacacgagctctgtccaccagagaactgaggacattcgctgcgttactacttttcagagagatggctttctcgtttcgtgacaggcaaatcaactggattcctaagaaattagttccacttggcatttttaaagaataatgatgttcagcaatagtgatcattaagatcagtgctagccacccaaatgaagccaagactctaaaaatacatattggcaaatagtgtacattaatgaacatcagcatatatcagtgaattgttaaggctaaggactatttcaataaacagattagagattatcaaagtctacaatatatttttaaatgagtgacagaaaatgattcaaaaataaatttctgtgttaaagaattattagaagaatatcatagactataatagaaaacaacatttggatccattggaagtgcaaagataaagtatttacatggattcattgttaccctgagaaagacacactcaggatgaacacatagtatttttgctatggtaaatcaattttcattatggaaatgtcattagacttatatggctacatataataaacaggatttgaaacacatgaattgtataatatcaaaatcttcttagtcttttttaaaaagcaaaaagaaataagattggttactgccacttacattcactgttttaccaagtaggtaaaggctttaaaatctacgttatattttggtcatttaattcagcatgcatttagcttacgctggcaatttaattatattatattattaatagcttagttgtcactgtattcacctgaaaacttcatgttgcatgtttcaaaaatagtatcttgctctttgtaaagtttttttttttttttacagtggctacatgtttgaaagtttaagtagtcaagacaataaatatcctccctagttatgttttaaaaataactaaggtggaatctttgtgcatatatttcaaaagcttggttagtatattagaagctacaccaaaacttaaagatcaaagttattgcttagacagtgcatgttgtacagtcagttactccacgtgactgactgcatgcggcacttcagattccacccaagagcacgtttaagtgtgcggctggttgtttctctctgagtgaccccttttcacaagaataaagtgagtgaaactgcccccagagccttttaatgtgacccttgacatccacaagtaaggaattccagggactcacatttggctaaaattgtatatattctttgaatttctaagaatgaaataagcaattgactgcttaggattaaaatgtataatatttaaactaaaattccaaaattcatcctaataaatacatttgttctagaaaagtcagcttcctagaacgttgactcctcgacaacagtattgctttgggattaggattggctttcaaaatataaaccagtgtgttttcccttaccatgcctttccccaaggaaaccttacagtagtctagcaccttacatcacaaaccattgtgcacagagagcagagggagaggataaagcagcttttgtatcgcggtctaacaggctataaacagtaagtgaattaccactaaaccaaagtctacagggtaacattatttttcaattggagagggaagagacatatattatgctaccacatttttaggtattttaatgccatattttgcattagatgaatacatttagctatacatattgtccctggcccccaatcccatccctgcccttcttcttgagaactaaaatgctttaagttcttcttagacgaaagataatactacagttcttggctttcagttgtacctggaaggactggtatattctcaaatgtgtatatttagccctagtgaaaataaaacttgcgtatatagaatctagcttgctgaataatttagtttttattataaaaataataaaaatattaggaaacttttcaactaataaaaatgaaaggttttgcaattataatgtataattgtcaatatttccagtgctttcaagcattcctcatataacagcaacataggagtctttttagatcttttcagctttattctaaaagctgtaaagctttaaaggaaatgtttagccataggaaaggaatataaactgagacatatggtaaagggctgaaggaattcatcgtcctcttagatagtgagtgcccagagagatgaacactagcaatttatggcttgaaattcttgggcctaatcatcatcttggcctgtttgaaggaggacttgtagccacctggctgtgcctggtttataccaggccaggtgccccagaaaatcccattacggacacctttgtatttctggtggtaatatttgccatttaagttggcagagagacatgaatcaaaccaccagcctgagctgtaatagagcccacagttcccagaggggtaccgatcgttgtctctgtctggggttgtgaaaaacctcaggtcatggttgtagtgtcgactgaaacgcaaggcatcccctgccgtgccattgtagttaccgatgtgtaatcggtatttgagaaattcattagccacataaaactgatcatacaaggcataaagtgtgagaccattaaagtcttcaagatctattctcaaaatcatttccttactcttggtcagaagatgaattttatcgttgcccagccaaaattctcgttcaaggtttccaaagccggctttgtagtctttccactctctggtgaagttggtgctgccatcaaggcgagcctgcagcaccgtccagcctccacccatggtctccatgtcacagtagacctcaaagctgctgtttctgtgatcaggggtaactctgtaggccccactgcttctccttcctagcacgtagtggtcggaacaatctttgtatattagatgttgaactggaagagggaggaaggaaaagcataaaagcatggggatttattagtcaaagctatgcacctcaaggactctcagactcaacagcaattggacaattcacttgcgttacagtttatgtgatagaggaacctggctctgatacactctcctgaaccaggctaacagatgctaactaaggcctcagaaccaactggtgttatcaagtatacaggactgccttgaatggcaatcctggtggcaacactaacagcaaagagtagtaagaataagtgtatgcaaggtttaatgagggtcaatgacctccagaaactctgccaatcactgtaacagttttcactgaacccacacagcagccttacgacgtggatatcacggccagcttgcttatacagttacttagtctcccggaagatcagggagttttcccaccgcaactaagtgttaagtgacagagctgggacagaaagccagatgtacctgacagagagttttactctcataaccattatattcctctgccttaacgttgagaggagtccaagtctcctaggatacaatcagcaattgttacagcagactttacagaaatcgttatatatgttctaaatgtcagccttcagtgcacagcactgttctgaaacccattcgtatttcacctgagattgacataaaatgattccagttttaaaagggaggggggggttctccaataatatggcaatgttatcctgaatttattatttaggaaggtatacagtcagccaatatttcacagtttggtttctagacgtagcagcagggtgattataattatgctcagtgtaatcatttggtggtttttgtagagattagagaccaactatttgttcccagttaattttaataaaatttgagtcaggtaaagaaagttcaatataagattcctgtaaaacacaataatctgtttgcatgtatttagaactctggagagtcccaagcttttaggagaaaagtaggtaacagaatatttttgtgtcattacaagttatatgccatgtcatatttaatatacaccttgtgatgtctcttaaacatgagtgtctatcttggtcattagtgataacattctatgacatgatgacctaccatctctagagattccaaatgaaagttatccctactatgtcccatcgacctcacagtcaggatgaacacagagggtgtggcaacccatccacaaaggtcctaggaatccaggaatccggacacagaaggctgttaggtctgtgaccttaaatagtgttaacattcactaactggaatggtgaggatgcatatgcactaagtctcaacccccgaagttctacacgtgtcctcatccccaccacacacacacacaaagagagagagagggagggagggaggagagagagagagagagagagagagagagagagagagagagagagagagagagagagaagagagaggagagaggagagagagaggagagatgcttccatgtataaaaatctcccattctcactagatatttgagaacctagcacagcagattgtttgtgaaagccttataaagcccatcagccacccaagatctgattcccagggacctaagcaagcagagccaggaaccttgccatacctgtcctgtgttcaaatatgtgttcagattccgggaggaatctgtttctgctcgtctgttggtcgacctagcagggaaggtctagagacttgcaagtgacggtctctaacgagtacaactaataggatttttgtacgtggatcatttaccatttctgttgtctcatttgagaaaacacttgtttctcctgccataacttaacaggtgaaagtctgactaacttatgctccctcgggttaatgtttatggccactatctggctatacagctttcatgaacaaactgtatgaccctcattacacctacccggctgtgactgcatgtgttcttggctgggacacttggaacacttgccatccaaactgttgaccacaacggttagatttgccactttgttgtccacgtagttctcaatgttgttcatatttaccagatggagcgtctccaggcgcccctgcagcccctggatctggtcctttgcattcttcagctctgaggacagcttgttcacctgactctccagttcctggactctactgtcctcggctgtctctgctccattccctccattcccgccgggatctcgatggtcgtcagcctgcaacttacagtcctggcaggatttcttcagactgtccactgcttccttgagggtccgcacttctttgagcacctcctccatgctgccaagctgccgcgggagctggatggtcagcgtgggcagggtgagctggaaggggcactggctcccctcgcacctcccgctgccctccagcctcgcggggcaggcagcctgggcgctggcatcctccagcccctcagtcaggttgtgctcctccaccgctcggcaggcagcgaggacggcagaactcagccacaaccaaccaggaagcctcatccttgcagtgcggcagcccagcctgaccaggcgctttaatagccaccgccgcctgactcaggcgttctgagttcccagaaaagggcgggcgcatttgcatcacagtctcagacgccacacaggaggagagggtcctcagcaagcgcagccagccaaatgctgtcatctcctgtcagtcaaaactatgcacaatagaatgcctgccgtgggtgccacgcattgtattcaagattcaccgtctgggtttttagtaaagcacaaggaaagtcttttgtttaaaaaacagttgtaataccagtgcccaaaagataccatattatatacttggtccactagtggggaaagagttggaacgtctaaatgtctgtgagcttcttcccactaaatgtcaccaaaatggaaatgattctgtttcctccctagtttgggaacctgttttctttttgaaggctagactttgtgtgaactcttaagtacttaaaattgcccctaatcagaacaaaggtccgctctttaaatggattctctgtgtgtgtctctcatctgtttgtaaaagggaagagaactggcagagaatacggctgttttctcctgactgtgcaggctatgtaatcgtcagtggttaaaacacttggaagcacgtcactcacacatcacaggcagtggctgtccttccccatcactcagctcaggagctgggggtctctcttaagttcattgtgcatactgacctcataaggtttcttattaaaagggattttattacttaaaaattatttcagcgtaactgacacagataaacccaaattctttctctgtactagttaaaggcactctgtaatctatctcttatttatttagactgggtctcaagtagctcaggctggccttgaactcctgatctctctgcctctccctcctaaacacagagatcacaggtgtgtaccaccatgtccagttctcatatttatatctctaaccagatttcccaagacttttctctactgcctcttaattctaactgaactactctcttcaaattctcagagcagggcaggcaggcgcactttctatctgagaagtctggaatgttggccctggcactgtctccaactggacataacacgtattggctttgctgagccttcatgcctgttaccagtgcacaaggaatttgaatattttttttctcctatagaaataacctatacagactgaatgtgcaaaggggaaatgtgtgtatgaagaatttgtcagacacgccttatgccttgtcttaccgcactctcgggctcctactttcccttctcattccatcccatgatatccaaaccgatgttagaccccatttcaccctgccctccttatcctctctcaggccaaggcactgccttgatgtaagggagaagtgaatagatgggtaatttcaaagagaggaagaatgacagatttaagttgtctcgaaaagtggacctgtataggattagattctggcaccttgttagcaagctcgggtgctaatctctgtttaccagtcaagaacttattccacttactgtatcgtcaccaccatgctgccacatatctacaacatgctcgccaacaccttgctcatccatccatggactcatcatattctagtgaccgtgtattctatatgaatacacagcattctcccgaggacgtgggccacattagtaaacctccaccaacaacagcaccaccaacaccaacaccaccaccaccaacaacaaatgcctttgctgttttagatactgaaggtctcctgttttcttcatgacatctcccagcctgtacttaggactttccaacgaaatcctaaacccgttgtaaacaggacagaagcacagctttctgactcctgacatgggctcattgttcatctctttgaatgggagattggctcttggggtttgtggttgactcttgagtttgcagtacaccacctaattctcagagtgaaagtgaaaagccactttgtttatccatttccttggcactgtcatatgatcttcaggattttcaacttaaaaaaaaatcattgtcccctgctggtgtggtgacatccactgtaatctcctctcttaggaggctgaggcagaaagatcaaagtttcaaggacagcctgagctacatacacagcaagattctgtctcaaaatacaacagatcatcactgagataatcaatttgtcctttggcgcttctgttccttcactgatggagcatagcatggccaactatcttcatttcctgtagttgtggtagacacaccctacgagtcaagctaggactattgtgttggatgactcaaaaactgtactctgagtatgcccctaaatggtcccgcagatctcagagttcttatggtgtgggtctgaaatgctcatgtgccacctgcttgatcatcagggtggcactactgggatgccctgtaatctctgaggtagtcctgggcaaagaaaggtctgtctttgagtggttggaagtttgctgctatagggcatcacaggacccccaagctcttatttctcctttcactcccagccatgaagtagatagttgtcaccatgctatgctccatcagtaaagggacagaagcccccaaaggacaaattatctcagtaatttattatagctatggaacactaactcagattccaaataaattgtatttatttttatgtatatgagtgttttgactacacatatatctgtgtaccatgtgtgctccttgaaggccagaagagagcatcagataccctggaactggagttatagatagtgagtctccatgtgggtgctgggaattgaacccaggtcctctagaagactagccagtgctcttaactactgagccatctctccagccacacaaataactttgggtgagtagacaaactttcaaagatgaaaccataaataactgaggactatgcatttttataaaatacttggctttaaattcttagaaagttctttacattttaagctggaataattaaattcattttaccaattttaccacttgcattccttagagctttattttgtttacatttggcattttgaataatatattaatacagatgtatatataatatataacaaatgcatatatttgtatgtcatacataatatgtaatgtgttatataatctatgtaacttcgattgtagaattttgcttaaaacattatttcagtattttagttcattgcctagttatggaaaaatgaaaatatcaaactaattctgtgctagtgaataaattatgcaacatacaggacttctgggggcctggctttctactcctagatattcaggattagaagactccaaaacctctgaaatatatattagcatgtaaagttttaataaacgtaaaaggtcacgtccactgctgctgataactaaggaaactggaataaatattgtatgtttaacaaccagtgctgaaacacctaggtggtgcttctcctaaggccttcactggaaatatttttagaaagttttacaaatgtaacattctgaggtgaagccctgacttactgtgtttctgctttgatgttttctgtcactggggctgcgtcctgtcacctactcactgatgatccttatcataagctgtgaaacttcccaactcgtttctcccctcagcctgtctgtctccgtggcttgtcacctctcctgcccctatatttgtcacagaactgttctgattgtgtttacatgaatgatacgggtgtggatcctggtcctggatcaatgaatcaattgcagtgatggccactgcagacaaaaatatagacacaagttttatcagtcacatgtaaatttaaagtaaataccttgttactaagatcatctcagaagatacctagatgtgagaaacagagcattgtgattttagtcagtgaatcttaaggcagaatgtctgctgactctcaggcccttaacagcatcttggtggctatgcttggcattgtcacctggcatggggggaaggtcaccttagagatctcctttacaggtgagcctaagtgtctgcccagtctctggtgtcaatagaaaagatgatgcctgtgtgtgttttcagacgctcatttcctccacagggctcagcactaatcttggagataaaggactttaaaaagaaagaagatgaaacaaacaaaaatggatgcattgctgagttcctggtggggtgggcagtggcttaaagttgggagcaatgattttcaagcccgagtcaggtttgggtaaaagtgatttagcctttaagtgaggttcactgagcacaccctccctgtatgtccctggctccatccaccatgtcagctttagcaccactatttaaataattgttttgttttcaattttgtacacctctctctctctctgtctctctctctgtctctccctctgtctctctctctctctctctctctctctctctctctctctctctctctctctctctctgtgtgcatctgtgaatgcaggtacctttggaacccagaagacactatctggagctggagttagaggtgcttgtgagtcacctgttgtgggtcctgggaaatgagcacagggcctctgcaagagcacagtaccaacaccctttgctcaccctgttatttttgtcattgttgattggttgtttggttttgtgtgtgacagggtctttctatatagagcagaccagccttgaactcacagagatctacctgccttggcctcttgagtactgggattaaaggcttggtttttccccctgctttttatgaaatcaaaaactttagaatcatttgatataaattagaccacaaggttggtgccaggtctttagagattccatggtgctgagcagagcagagccttttgtttgctccttcaccagctttgaaccctttcctcttaatcctcctccctagctacctccctgcccccagcccttcctttgctaagcagaaggaaagcgaaagggggactgagcctttctttacagtgaaaggttcttaaaagagagccacttccccatacaaatagcattgtaactttcataggtctaacgtttaatgaatacagggtttattaactgcatgaatgaaagattctgcagactatacaggacaaagacacagctttagttgaggatagtgggacacactgctaatcccagtatttagcaggcaaagacaggcagatcactttgagtttagactagcctggtctatacagtaagttccaggatagcctgagctacatggtgagagcctgtctcaaaaaacaaaaaacaaacaaacaaaacaaaaacaaaaaacaaaaaaaaaacgacaaaaacaaacaagaaaacaagacaaaacaaggttttatggtttatgtccatacagccttatggataccaggtgtcttagcttgggattgttttatcttttaatctccgctacttccgcctttgtccttgatgttttagttctgtgcttctgaattaggtgaaagtaaagagaaacacttgctttcagcatctaaaaagcatgtgcatgctgtgtggggagactctcctcttgtctagcctgttaggcggcttaggttgctcctcactactccccaaacactcagcatctgatgctcgttatgtggtccatcttttctaatttttcctcccatctccacccaaaatagatccccacagtagacgaaaatacagtggaatggaatgaagtctgtcccaaggagatgaaggaatgggagaagggttacagagaaacagcagcgagaagtggggaaatgaaagtgaacctgagtggtgagaccaggggtgggggtgggagattcagagcctcagagcatcaggcagaagccacccctctactccatggtggccagtctttgggatagctgcttcagcttatgtgataatgtccattgacaaagttaaataaacttttaggctatccaagttccaaatagctcagctttacaaaactgcacatttttagccaacagacacaatccccagatgttgcaaggaatgctgctgtgaactgtttgctatcataacaatacactataatttcttgagctttctgtactttaaagggctgttagcataggaaattgcaaaactagcattgtcgggtctgaggagaattaagtaacataaaatagaacaaggagctggtagagtttattcagcaactagaactattacatagctgtctgaagctgccttgacctagtgccttaaaacctccataatgttcatcctaccagcattgtccttcagagctgagggaagccatcagcctgacagacactgcaagcatggcctagtgtttatgattatttcatccagattgtacctttaatgttagaaaatttaaaagaaactcctatgaaaataggatttctccacatctaaactaagtacagtgttctggagaatgtaatacaatttccttaagtctttcaaaaataattgagagttcctaaatgtgctagccacatactttattggatatgatgttccagttcatcactgtggtggcttgccccccacccccatagactcatgtgtgtgactgcttggccacagggaggggctttgttgggaagtatggccttgttggggtaggttttgccttggtggaggaagtgtgtcactgtgggggtgggctttgaggtcttttatacgctcaaactatgcccagtgtggaacatagcctcctcctgctacctttggatcaagatgtagaattctcagctgcctctccagcaccatgtctgcctggacactgtcatgtttcccaccatgatgataatggactgaacctctgaacctgtaagccaatcacaattaaatgtaaccctttttcagagttaccttggtcatagtgtttcttcacagcactaaaacctagtgtataataatctgtgcctaaaatatttttccatttgtcattttcatatgttatacattgaacatattctttcacctccattaactcctccaagatcccctctatctctctacccacccagtgtccactctcaaaaagaaaaacaaaaaaaaacaaaaccaaccaaccaacaacaaaaaactctagtaagtaaaatagataagaaaacaataccaaaaactacagcagaaaacatggagtctgttttacattggccagcgactcctgggcaagggactgccctcaagtatgctatgctcagtgacactccactggagaaaaatgattggccctttcgcagcagataccaatggcaaatgccttcttagttagggctgggactttgtgcccactttcccctctcagggctgggattttgtctggcttcaacctgtgcatggcttgtgtgcactatcacagtctctgtgagtttgtatatacaccagccctgttatgtctggaagactctcccttcttggagtcttctactacctttggcttttatcatctttctacctcctgctctgcatggattcctgagcctgggaccaaggattgatagagtattcggtttagagctgagtgttccaaagtttctccttctcttcacattgtccaatgtgagtctctgtgctaattacatctactgtaagaagtttctctaatgagcaatgcactgtatagcagtacgtcattaggagtcattttgttgctatgataatatagcagaataatagtagttttgttttttttttttctcttagggtccatggtctacatagtcttaggttcttggcctctttagcagtgccagatatgagttctagcttactgagagaacccaataaaaaattgactccttccaccacataggttcccaggtcaacaatggcaataaatgcctttgccagctgagccatttggctggccccttgtacactttacagaaaaacagaaaacacaaaatagctagcaaatgtgaggccctaattcaattctcagtactttagagagagagagagaaagagagagagaaagatgggggaaagaggatgtcgaggaaaaatagagggggagaaacatgtgacaactgaagtcatactactttctttgttctagtaaaatatacaatataaaacttaattttaatgactaaatatctagtacttaacccccattaagtacatccacactgttgttcagttcctacacagttcatcagcaggactactcatcatcccactgaaactccacgtgtaggtaacttcctagtctccgtctcttcattctccctaagtaagcatcaaatagcctctttcataattggaactgtataatacttatccatttgtgtctggcttacttcatttaatgtaatgtcttcacattttatccatgttgctggttggtatcagagttttgctattttatgaaggctgagttatgctacattgttcatctcaattttttgtttagatctttcaaaattaatttctgttgacacataatttttagttgacacaaaataattagtatatctcatccccttacaattttcattgtctggtgttaaatacattcagaatctccttttgtaaccaggaattgtggtaatgccagtagcactcggaagctagaagtctaggcagcatgagagcaacatgagctgcagagcagaaatctgtctcagaggaagaaaggaaggacggatgcctttattttgagttgtacaatgccttgtatattcaccttgcatatagcttcttttaaaaatctttgttaagacctactgattatgcatcttaataggtttcattgtggcccttccatacctgtatacaacacacattaacccaaccatggttttcagattctgcccatcttacctaccccaaatctctagcaatcactattctcctcactggtcaacattgtttttagctcccacatataaggtagatcacgagggtactggtttgtctctgtctatcttgtctcattcaataatgtcttagtctcattcatttttctgcaaatgttaatatttcatattactttgtgtctgaataaaactctgtcatgtatatatcatgatatatgtctatatcattatctgttgctgggcacctaggcggatgtatgtgttatactgctctgaatagcactgcaataaatacgacacatagtatctctttggtatgctgacttcatttcctttgggtataaacctgagtaacctttggatattgtcttagtttcctttcctgatgctgcaataaaacatttcgacaaaagtagtttaaagagacactgtttatttattctagctcagagttcaaggctacatagtccatcatggctgagagtcaggtgagaggagcttgaagaagagtactgaatgcacactcttgctcagctctctcttctcctctcatgcactccaagatgccagccagagaatagcaacaggcacactaggtagatcttcccaccccaatcaacatggtgcaggtaagtctccaccagcttgctggggggggggggatttctcagatgattctaaatgtccaggtaacagttaatcctaaccaccaggcatactccagttggattgaatggtagcctgtcaattttgtagttttgatgagtctctgtgcttttagccatagtagctatactcatttacatttcctctaagaatgtgtaatagttaatcttttctgaatcctcaaagtcccacctctatccccctgcccagtcattggctgttggctctttattgcttggtcattaccatgtaagcacaaatcaaaaccccaacatctcaccccctttgtccaataaaaaaaggctcttttctctcagatataaattgagcacaaccataacaattatataaaagttataaagtatagcatataattaacacccagtacatcatatttgtcagttagataaagtactctatcatgtattctgactttaaaagtttacagttctaattctgaattgtgttctgactttaacttgcattatcatctgaaaaccatcctttcaaatctctatcatcttcctcaatgctaaacaatttaagtttgattatgagactgtaattagtcttcaaccttgtctgaagtctgagaatgaattagatatacctgaaagtataggaagcacaaaaacatagcttctagaacttaaacaaattgtagagatagctgactacctggacagtcacctattccttaaaacattggaacatctgtcttcagttttctggtctagcatcatctgacagatcttaaatgaagcaggaactatcaaggactatttactctgttttggcagagctaagttgttgactatcttgcattgtatgtgctttcttggacattattttgtctgtagacgaattagggcagtttttatccagtggctaacttgctacaactagagcaatggagcacaatggaggttttgatgcttaattttttctttgaactgtcaaggggttgttttgagttgcggaacaatgtatgttagctaaccaacattgattacctcacatatttcgggatgattctctgaatttttcagctatggtcaccacagtgtatagtggatatacactgtgaatttatcccttctattcacctgagatgttataccttcagccatcgtcttctcagttcccagctggtaatcattccagctctgtaaccatcttctgctttgtgtgtctgtggcatcaacagtcttggcatccacatgcaaatgaaccatgaacctttgtcactgccctgtgtctgtcactctacttacgtagtaggttttgctgaagtctgaatagtatttgtatgcttaaaactcatcttctttatccacctatctgctgatggggcacatcaattgatttttttatcttggctattgtggacagccccccccccccccccgggccccgcaatctcatctcctttgtatatatgcacagtaaatgactttgctgggtccttccccttagctttatgaatttactttttgaattggcacatactactttagacttgacattatgtgtggggataaaacccaacttcaatcccttgttcaatggttaatgagctgtttcagtacagggttttgatgagctaaattattttctgctttagcgtcaaatgccacattttgttttttgtcgaatttcacgtaagtgtgagattatattcataagcctgctagtttttacattgataatgctctcttcatcatagagtgtaaataaatatcatgtacttctaacataccttaaatctaaaaggggaagttcacatgtgtcactatttttaccttttcattcattatttgaaccgcttattagcttgcattttgaaaaatctcagtgattattttgagaattaattcttcttgacatattttattgtcctcaagcatttgtctaaatctttgtgttttctcaaatacctttgtggttttctttataagaatgtctcatggttctggttctcttgacttttagatttattatcttgcatgctgctactgtaaaagattttcagttgctgttttagtatttagtatttagcattttagtaactaaaaatctgtcttgtggaagctggagagatggctcagcatttaagagcacccagaggacctgcatacacttgccagcatccacatggcagcttacaaattcctgtaactccagctccagggaatccagcctccttacacagatgtacatgcaggcaaaataccaatgcacataaagtaagaataaacaagtcatttagaaagttaaaaagaaaaagaagttcctttgtatacatgaattttgtaatggttatcaaactacaggtattatacttatttgcatttttgtggaaggcctttgtctaatagtcttttcttttttttacattttttcttctttaagtactttgtaaatattttctgaattctttttgtccaataagcatgctccaaccaggtgaaccctttcatattttggtgttaatgggaatcttcttagattttcttaatttgactggacagtggtggtggcacacgcctttaatcccagcacttgggaggcagagacaggtggtttctgtgtttgaggccagcctggtctacagagtgagttccaggacagcctgggcaatacagagaaaccctgtcttgaaaacaacaacaaaacaaaaacaaaaacaaacaaacaaaaagcaatttccttaatttgggaagtcctggccatgtgcctacagtttaccatgcggaatagtcagttctcagtggttagcatctgtgcctccacagtaacatagtaacccaacagattcccttagtttcttcagtctcatagatatgtcgttttacataccaaactcctattttacaatgagcctgttgtttctttttgtcgggggtgctatttgtagacaggaatctatagaccagaggcatagactttgtttccattcttttcaatagaaagagctggaaaagataaatatctcacactaataaatatatcatgttcatattctaagtcaataacagaaaatttatataacttctttattcttacagatgtatattttttatacatgaaaacactattttacaatcaccctcccataattactcactcaccaccccacaagggaacatagttgtttcagaagaattctaccaacaacgtgactataaaaaacagatgtggatatttttccttagggaacaaactagtcgtgatttcttttagaattgcaatggtctcttcaccaactgaaaacagttatgttcaatttttttaatttcagtgattgcttttagattttataattaagttattgtgttattctagtttatatctacgaaacagaaagtgctaaaagaatttaagcctctgcctatagcttatccatcctgtttcctccatttccaatcatgactctattttattctttcctttatatttataaatgccttttctttgtccataaggtagttctgactttaacagctttttataatggttattttttatttataggtcatttaatattctcatctcctaattttatgattaaactaaagtgacatcgcctggtgtatcctctcccacatttcccttataccgagaattaattggatggcatctccttctgcctccttgagtggtcttcatacctcttcacctggacaccatggctctctttcttgttctgtctcccgaaatttacaggttattaatttctgagtttctctgctccgcagaatagagttgtgattaagtccctggaaagcctctcactggccttctgactccacacagggtttttttcaactatcacttgagttttcttttctttatagaaaatttgggttataatgcgggtttcataatgtcattataagtactggatgagatgatatgtggatagcacataacatcatatgtgctatgcagcagtatttcaggaaataaaatgttggctacttgaaacaagatggaagaggtggttattagttcataattttacgtgggtattcgtttggtaaatatttactaaatcatttttttcattattcatttaattagtgactacttattgaatattatctcctaagcattcttgtttatatttattcaacaagagttgagtccacatgggttaggtcttcgtgatacagtggtagaaaagatagatatggccccaaccttaacaagtttcagtcttctttcttgctgaaagccatttctaagtaagcaattttgctctgaaagtccccttaggcgtccccagaatgctggcacttgacatgtctgaaaataatgatctcatttcgctacattactgaatgctcagttcccattttattcaaacttctactaaaattaaaactgctaggcaagttgttcagaactcttctgtacttcccttacaaactgcagtttggtttgaaattccaacaactatagtacccaatgaatcaagggtgacatttacaatgaggaaaaagttctttatggcaaacaacaaaatttagctaacatgtctgctctcagtgtttctctaaccctttcaaaatttattttccattgttccattctgtacgttttattccactgaaactaaacagcaaaatccacatcaataatatttgaaatataaataatttctataatattttaattcatcaacaaagcatcacatttaggtttatgtgatcttcccattaaattatacaaaaacagcaaaaaaaaaatctctgaaagtataaagttttagatctgaaacctgggacaacatgctcaaacagctttatcctcagagaggagaaaagacaggaggaaaggagagaagagaggagagaagaagagaggggagagaagggggaggnnnnnnnnnnnnnnnnnnnnnnnnnnnnnnnnnnnnnnnnnnnnnnnnnnnnnnnnnnnnnnnnnnnnnnnnnnnnnnnnnnnnnnnnnnnnnnnnnnnnnnnnnnnnnnnnnnnnnnnnnnnnnnnnnnnnnnnnnnnnnnnnnnnnnnnnnnnnnnnnnnnnnnnnnnnnnnnnnnnggagaggaaatgagggatggggacgggggacacctcccccgaagctagcacaccaggttttgttttttttttttttcagtcggttgaatggtattttaaaggtagatgcataggtagatgggtaggtggatggatggttccaatatcaaatatctacctagtccataaaaataacaaatggtagaaatgacctgagacttagtatgaagcatgtgttgacagaagaggcaggttgtacttctaaaagggcagtcccatctagtacctgcaaatggcagtctcttttaaatagcagttgtttgattactattcgaatgtgaatccagtgtcatcaaatttaataaaaatttcacttagaaccgaaaacttgggttttgatggcaaaacttaattttttttgagttgacaattattttttgaaaatacgtgcagcggctgaggagatggcttagtcagtaaagtacttgcaacacagccttaggatctgagcccagattcccagcacctacataaaaagtgggtatagcatagcacatacctatgctcgcatagagcataccagtacacacatagagcatacctatactctcagcactggagctgggggacaaaaacggctctggggcacaggagccggccagtcagctgaattggtgagtaccaggctcagtgagagactctatcccaaacaataaggtggtgagcaagtgaggaagactcatgtcaacctctgatctacaccccaacacacacatacacacacacatatacacacacatatacacacacacacatacacacaaacatacacacacacatacacacatacacacacatacacacacacacacacacacacacacacacacacacacacacacctctagtgtgtttatacagttggctgctagtttgcagtctctgccacaaattgcaccattatgatgtggttttacatggtttaaaagctatagatgctattttacttccttcttcagatatgaaaatttatataaatacttaacttatccttaaactgtttcaaccagttcaaaataactgaaaatatgtcagttccttgaagtgatgctatttatgtttgccagaaaacacattcagtttttgtaatagtcaatttagtgaactagaaacagatgtctttgaagaagtgtttgctaaaatctatttaaatttttcatttatttttattactttgtttatcaaggttggtattaagtaagaaaagctatggttatcttatggcattctgatacagttttctctgctttttaaaaagctatgatagactgaaaaaaaactaggtattgattataaaactaaattttctggtaaattgtgttattttttttttcatacccaccctttttggggacattccagggtaatctgctatttaattcccaaagagtatagctatttttggtcacaagctaactggaatgtttaaagaaatttaaaagacagctaactggttcatattaagatagtataaaagttcttaacttcctaaaatattaattttataaatagccattgagatagtaaaattttacttttacttcccctccaagaagaattgttagaatatcaacatccatccagccattgcatcttgtgacttactgatttggtccacagctctactgaagttgttagtaactcgtagtcatatgttctggaggtagaccatgttggggtgaggatgttctctgggtagtaagctgtcaggacaaagcatttggtatgttcttactcgaaggctcttccattttgagcttgtatatatattctatatacagttagctaatccacaaccaaaatcaagttgatagccttttcaaaaaggactacacacacacacacacacacacacacacacacannnnnnnnnnnnnnnnnnnncacacacacacacacacacacacacacatacacacacatacacacatacatacacacacacacacacacatacatacacacacacacacacacatacacacacatgcacacacacacatacacacatacacacacacatacacacacatacacacatatacacacacacacacatacacacacatacacacatacacacacacacatacacacacacacatacacacatacacacacatacacacacacacacacacaccacacacacacacacacatacacacacacacacacacacacacacacatacacacacacatacacacacacacacacatacacacacacacacatacacacacacacatacacacacacacacacacatacacacacacacacacacatacacacacacacacacacacatacacacacacacacacacacaccacacacacacacacacacacacacacatgtgcgtgtgcatacactcgtgcatgcactttctaaactgaccatggtgcatttctgaatgactggcttagactctgatgtcctccatggtcattttggcccagaccacatgtgtatgtggaaagagaaagccacacattgtgacttccttcagtgggatggccccctgaagccatcccacatcagactgccaacgtgtgctaagcgtgcactgtgggtcccggacggaacatgatccctgccttcagagagctcccccccacctccaccccggtgagcatggactcaccatgatgggataagagctctcaccgagaatgtttgtgatatggaggcctcttcccttcaacatttccagaactttggtgtcaggcagtattctaaaactcagatatatcaagtaaacaaaagtgccaaatacattcagacccaaacatctgtagaacccataaaaacctcattctggggttgcgagttcggtcccctgcttatgcagcaaataacagagtgaagaaaacgggacagctcctgtacagctgaagacaatggcaaaaggtgaagttaagaaaaaaattccattcacaataggttcaaaatgaacaagagagctgagaatacatttaattaaaataaatggtttgtccaaatgatgccaggatgtgaaggcctgtaacagtaaattagcaagaatgaacctcacacgtccgcacagtccatccccaagttccattttatggtattaaagcagaagttgaagctgcagctttgaggtttttgttcttttattttttaaagagcatggctgtgatcagcagagaaaggcatcattgtccaccccagtctgcctgctgggagggagtagggagttctccaagttgccttccaggccaaactcacggttgcagatggactctggcaaaagcatctttcaagtaagaaggggcccagcaaaacaaacgaaagcaaaaacaaaacaaaaacagaaaaacaagaaacaaaaccacaaaaccctgacttcctttgttgtgtggagcacctctgcctgagcctgaccagccttgagctggaatgaactgatggacagctcagacagctgagagaggacgcactctcagcacacaaaagtggccctgaaagctgggcacccacagcacagaaagcaaccacatccagagatacagtctgattttaatctgggtgcgcccacacttgcagggcagcctcttgtcagcggccgtcatctgagacaacaaagaaagctgagtagccagctgtgcacatctccatgcattcgtgttctttgcatgagcaacactcatgtcaaccaccagcacactggctccctgcacggttttattgcccacgtcactcaaggcctttgcaggtgcagcagaattgaagcctctgtgtgtgtgcaggactcaaagctcattggtcagagtcacataaacagaaacccccttggggctcctcttgtaggccgcttccaccagcgcttctcctctgtgattttgttttaatctaatttctttcccgactcttcttggattgtgctctggcccgatgtgactgtcgtttgtggtgagagagttttgagttcattggtgataagccctggctcgcgctatcaagtttttcaagaagcatctggtcatctgtctcatgtcctgtctctcgctgccaccgtccctgttgtcatccctcccaaggatcctgggagctgttatgagtcttttaaatagcttctatacatgcacaataagctatccacaaatgaattaagaaggaaattccattcacaataatagattcaaaaagaataaaatacctggaaatatctgcaataaaaataaatggtttttataatccaacccaaatgggattgttagcatcccagacaacttctatttcaccaggacaactgttaatgtttaaaggatgtagcatcttactgacatgcatatgctcggcatgtacttatctactttgctgtgtatataccattaaacaattttcatttaactgtgagaccatgcttatagctaggcacctgaactatttaatgtccactgcctttaataccttaatgcctgggaggtcctgtttgtctcttctgccctccccctcacattcctgtggagggccaccaaaggagaaaccagacagctgagtgaacacagtgccggctttccttctgtgagccttgacagccacaacgggagaagagaagcctgggcgagctggccagtttgtccagcacatttctactttcctgatcccatttcaggccaactgcttgtctctgtttctccctttacatttgccttctgtgacagagaagttagagcagaagcgaagggatgaacccaagttctcccaagtatattgctgtttttaagaaaaaacctaagtcagtgacaatttaatcaaagttaattagagcttgcaagatgccaaactgtgctagaagtcaaagatgagaccagtgaggatcctcccagggctgaggagtacgcagtttgagacatacttgacagtgtgtaactgcagctaatgtgtacagtaataggtgtgtctgaacatataggagcaacggagagaaagaataattttgcctggaagtttcacataaaaggagctgtagatggtgagaactgggattgatttttttacttttttagctactggcttcctgagacagaggctggccttgaactcccatctctctgtctccaccttccaagtcctaggattacaggcatgtgcctagcttgactccaggatataataagactccttcgagaagaaaagagagaagaaaaagcaaatcacagatgggaaagtccaacagtttggtaactgccctcattttttattactaccataacaaattattacaaatttagcggcttaaacacagttttaccatcttataactctgaaggtcataagtccaacttgggtcacagttggccacagtcaggttgcttcccagactatgttctttaagggagggtatctggctgcttggtttggttcatgatcaccttccctccatgttcaaagcctacagtgatggggtaaggcctacctgctttcaaaactgatcttcctctttcctttttatccatctaaactacccaggaaaaggtctctgcttccaaagactggcaactaaactgggttcacttggataatccacagtgctccctctacctcaaggcccatgttcttactttagctgcagaattctctttgccatggaaagtaacaaatacacattccaggagttaagacgtgggcctcttggtgagagcattaatctacctaatacaggaactatttcatggcactgaaatgaccagtggaccttaaagacagaagacaggttaagaggggttgcagcttctggataacaaagaccctgcacatcatgtaatagaagcttaagtgctgaggccaaggtgagaattgtgtcatctggtagcttatacgaaggacagagtcaaggtagataagacataaatctgtgaaagctgtgcattgccaacatcttagtaaggagggataaggctttgtgcatggcactttgtagattgtctaaaacaatcgagaagaacgtaattcaacaggatttataaaagaaatccccatagtgcagaagccatgcttctttacggggtagggccaaatcttgaggaacactaacttttttttcaaaatttattttttattacactaataaaatttattttaaaatatacaactcagtattgacttctttaagtcatcaaaataatttataatagctaaatgtctcttaaatatacatggtatcttctgaagataaaagtaatatgtactcaaccagtttttagaatctatttggaacattaaacatgatagaagtagaaaaaaattcttatgaagtcctctatgaaaggaaattgtcacaagttcctgattaaactgaaaccatttcatctccaagggagactacagagtgtaactgtggcttcctaaaatgaattgggtaatgttccttctgtttctattttgtgtaatagtttgaagagttttggaattaggtcctctttgaaggtctgataaaatttttcactaaacccacctgggctatgtttttgttgggaaaccttttttttttttttttttttttttttttttagatggtgacccttttatttttgctttggagaacaggtttagacatttaacattttgatgtgtcacgttgtgtatgtttcatataaaattaataataaatgtagcaatgctgtataacattacatacgtatttctattatttatatagttatttaaacctcagttttccttaaagagaagctagacaactcctttggaattaaacgagcaggaaactctgtaattccacaatccaaagtcgtgagaactaatacaagaaagtgacctgggctagttgggaaacttttaatgactgcttttatttctttaggggtttggggactgtttagtttatctgatcctgatttaactttggcatttggtatctgtctagaaaattgcccatttcatccagattttccagttttgttgaatataggcttttgtagtaggatctgatgattttttgaattttctcagtctctgttgttatatcaccattttcatttttgactttgttaatttggatactatctctgtgccctctggttagattggctaagggtttatctaccttgttgattttctcaaagaaccagctcctggttttgttgattctttgtatagttctttgtgtttctacttggttgatttcagccctgagtttgattattccctgcagtctactcctcttgggtatatttgcttctttttgttctagagctttcaggtgtgctgtcaagctgcgagtgtatgctctctccagtttctttttggaggcactcagagctgtgagttttcctcttagcactgctttcattgtgtcccataagtttgggtatgttgtgccttcattttcattaaattctaaaaagtctttaatttctgtctttatttcttccttgaccaagttatcattgaattagggtgttgttcagcttccatgtgtatgtttgctttctgttgtttttgttgctattgaagaccagccttagtccatggtgatctgagaggatgcgtaagattatttcaatcttcttgtatgtgttgaggcctgttttgtgtccgagtatatggtcagttttgaaaagggtaccatgaggtgctgagaagaaggtatattcttttgttttagaatgaaatgtcctgtagatatctgttaaacccatttggtccataacttttgttagtttcaccgcatctctgtttagtttgtttctgtgatctgtccattgatgagagtggggtgttgaagtctcccactatttttgtgtgaggtgtaatgtgttccttgagctttagtaaagtttcctttatgaatgtgggtgcccttgcatttggaacataggtgttcagaactgagagttcttcttggtagattttcctttgttgagatgaagtatccttccttatcctttttgataacttttggttgaaagtcaattgtactcgttattagaatagctactttaccttgtttcttgggaccatttgcttgaaaaaattgttttccagcctttcattatgaggtagtgtctgcctttgacactgaggtgcatttcctgtatgcagcaaaatgctgggtcctgtttatatatccagtctgttattctatgtcttttttggggggaattgagtccattgtgttaagagatactaaggaatagtgattggtgctttctgttatttttgatgtttttatgttcttttgggtttgttgaaagaagattactttcttgctttttctagggtgtatttcccctccttgtgttggtgtttcccatatattatcctttgttgggctagatttgtagaaagatattgtgtaaatttggttttgtcatggaatgtcttggtttctccatcaatggtaattgagaattttcctgggtatagtagcctgggctggcatttgtgttctcttagggtctgtatgacatctgcccaggatcttattatcaatatattatagagaatagaagcagcagttttcaaaaatcccaaatcagacttgtaaagacaaaacaccagtctctgaatggagaagtcactgaaaagatttagcaaataagatcccgaggaagagatgggtaaacagcaagtaatggtaattactgtcccaatccaaccatggaaagagagagatgaggaggaagatctttaaagaaccagaacaagaaggcacagtcagtgtcaatgtgctgagcaggcagcgtgtccaatgtgtggaagaggagaggagagaaggggagcagaagagatgaaaacagaaggaaagaaggttcaccacacagggtgtggtgtctgtggcaagcattcttgtttgtttctatgtgagaacagtgaacagatttgtgggttgaggataatggtaataaaatgactgccattggttaaaccttgatttgtgaactgaaatacaaaatggcatgaggtatcaagatatttcacttatattttctttgcctttatcatcttataagatgggactgtcctagtttgctttctgttgctgtgatgaacatcttgaccaaaagcacctggaagaaaggagggcttatttgaccttatatgttacagtccatcataaatggaaggcccgccaagagtaaggtgggaactggagacagggaaagatgcagaaccaatggagacctggttactggcttattccgctatctttcttatatagcacagacctacctgcatagggattcgtaccgcccactgtgggctaggccctcttctatcaattagtacaaaccagtctgaccctggaaaattcttggttgaggttttctcttcccaggtgactttaggtttgtgttaaatcgacaaagtcatgaggcctgtttttccctatctttcacagttgaataaacagagccatacattgattagatattattctacattacatagtttaaaagtagcaaagctggaattcaagccaagtccatgtgttgtgcatgtggtgctgagccagcatgaagagaaagcagagacagacaccctaactgatgacgtgggaagggatgagacagcacagggaggtgggttgaacttgaccaagaagctgtgtgactaagcaggagtgcactagaaatcgctccgaatgcctgtgctattgacttccagcagggaaacagaggggtgagtgagagaggaaagatacagactttcaagctcatgacacatccagaatcatgccaggcattttgtaaaggcagccagaccagcagatactgtccgcaaggccagaacaccttggacagagtcacggttcctgtacacgcccacacgaacactaataatttcctcatgctgacctcctttcagataaggtcacttggtagaagatctttccttggaatgtcctaaaatttcaacttttgacatttttttcatactactccatgtcatccacaaatcgtgaactcttgttaaacttttggctacagagtaaatgtttccttcaagtcacaattaccaactaggcggttcagaaacacaagtccctattgtgcaattggatttgggaacttctgacattatatttaacctttcatgtgtatatgctctaacagtttaacactggcccttcatgctgtatttctttgattctgcatttttaaaatatgacacacttggtttctgtacccacttatattgtgcagtgtgaaaatacaaccatttttttccacatctgatactgtggatgaataaaacattttttatccactaaaactgagtccaaagttcccacccatggatgggacaccttaaagaaacagtctgtagtctcacaggaaaggaaccttttctgagtgtgagcatggagattatgactgatttattcttttccgtgtgtgtgtgtgtgtgctcatgtgtacacatgtatatgtgaagaccacagatcaacatctgaggtcttcctccatcactctcctctttgatttttgagactaggcctctcaatgaacccagagcttactgactggctagccagacagctcgaaggtactgcatatctcagcctgctgctatatgacttcttacatgggaactatggattcaaagtcgaagtctttgtacctgtatgccagaaactttactgagtgagatattttctcaggcctgacttttaattgtaaggacataaatatattttctgtgatttcagtatttttctcataaaagagatttgttttcagtagcggggacagaaaaaaaggttttcttcttggacatctgacttaacttttactttatacataatcttcaaagacaaatgaagtgttttatccactaagcatttgtgagtttataagatgctgagggccagtggagtgataaagatggctaaaaggtgaacctctctagacgtcccactttatctgtggctgtaaaacctgccaagcatcctggcccacctgccattagacttcaagtaatttgtgaccagatggcactgcatttagaggatagtcagcccaactttgccagaggtttactctggctgccagcctctcagatctgacccaccatcctccagcttgaaattctgctctgattgtccattcattagaagtcatgtctagcatattttaagagcctataggtattaaaaaattgaacctgtgttttgcaaggaatggaggaagggaggaaggaaggaaggaaggaaggaagggaggagagggaaagcgagagggagaggtatgtgtatacagaagcgggcacatactttgagcacagaggacatttcagcgtgtccgtttggatcttctggctctctagtcccccacaccaaggtaaaatcagattgtgttctacatgaggaacttaaccttcttactcaaggcagttcagcctcattctccactgcacagctctgaacccggtcattgacgtttgctggcttctttaagtggtaaatgacattaaagagtacactgtagatattatgaggtatttgtttctaatgtggcatttttctagacctgtacacaagtaggatttaaaaaataatggcaatgaatttatacatttatttgtttgtttgtttctcaagacagggcttctctatgtagccctggctgtcctggaactcattctgtagaccaggctgacctcactcacagagaccccccccccctacctctggctcctatagtgctgggattaaaggtgagagcctctaccacctggcttatacttggttttgaatttaactgtactattttcttgggttttttccagttgcatagctctttttcatattggaatcttgaatttacagttatgtttttgttttattgagttaggatgcacatagggaaaaaaactccactgaattttagtgtatgtatagagttgtattatcagcatgttctaattttagaatatttccattataccaaaaataaaagttgtgtctcttttcttacacattactccttctcttggttgtcatattttgatggggattgcattgaatctgtagtttgctttcagcaagatagccatttttactatattaaagctgccaatccatgagcatgggaggtctttccatcttctgagatcttcgttttctttcttcagaaacttgacgttcttatcatacagatctttcacttccttagttagagtcacaccaaggtattttatattatttgtgattattgtgaagggtgttgtttccctaatttcttctcagcctgtttgtcctttgtgtaaagaaaggccactgatttttttgagttaactttatatctagctactgattttagtgggattgcttcaagtttctctccatttagtttgatgttggctattggtttgctgtacattgcttttatcatgtttaggtatgggccttgaattcctgatctttccaagacttttctcacaaaggggtgttggattttgtcaaatgctttcttatcatctaacaagatgatcatgtgatttttgtctttgagtttctttatatagtggattacattgatggatttctgtatattaaaccatccctgcatccctgggatgaagcctacttgatcatgatggatgaccgtttttgatgtgttcttggatttggtttgcaagaactttattgagtatttttgcatcaatattcataagggaaactagtctgaagttctttttctttgttgggtctttatatggttttggtatcagagtaattgtggcttcatagaatgaattgggtagagtagcttctgttcctattttgtggaatagtttgaggataattggaattaggtcttctttgaaggtctgatagaactctgcactaaacatatctagtcctgggatttttttggttgggagactattaatgactgcttctatttctttaggggaaatgggactgtttagatcattaatctgatcctgatttaactttggtacctggtaactctctagaaaattgtccatttcatccaggttttccagttttgttgagtgtggctgtcttagtcagggtttctattcctgcacaaacatcatgaccaagaagcaagttggggaggaaagggtttattcggcttacatttccatactgctgttgatcaccaaaggatgcaggactggaactcaagcaggtcagaaagcaggagctgatgcagaggccatggagggatgttctttactggcttgcctcacctggcttgctcagcctgctttcttatagaaccaagactaccagccctgagatggtcccacccacaaggggcctttcccccttgatcactaattgagaaaatgccttacaattgcatctcatggaggcatttcctcaactgaagctcctttctctgtgataactccagctgtgtcaagttgacacaaaactagccagtacaattgaccccttgtcaacttgacacacaaaaacatcactagtaagcctcaacccttacaatcttattcatccccattctaaataactttaaaagtcccacagtctttacatattcttaaattttcaatctctttaaaatatccatctcttttaaaattcaaagtctttttacaattaaaagtctcttaactgtgggctccactaaaacagtttcttccttcaagagggaaaatatcagggcacagtcacaatcaaaagcaaaaatcaatctccaaccgtccaatgtctgggatccaactcacgatcttctgggctcctccaagggcttgggtcacttctccagccatgccctttgtagcacacgcgtcatcctctaggctccagatgcctctactccactgctgctgctgctcttggtggtcatctcatggtactggcatctccaaaacactgcatgaccccttcagtcctaggccatcaattgcaactgaggctgcactttcaccaatggccttccatggcctctcacagtgctaagtctcagctgctctgctcaactccttcatgccttcaaaaccagtaccacctgggtgacccttacacgttaccaagtccagccagagcacaaggtacaactttggctatatctggaacgcagccactgtgctctcagaaaacacttcccagaagatgtcacctcaatgatgctggtctcttcttaatcaccgctaatttcttagctccagctaaccagcatcaatagtcccagtaatgcaaagtttttgctttagtagttctggtatcttgttaatcacagctgattcttcagccccagctaaccagaactacagaatcttcacaatcaaaacagcaatggccctgaaaagagtctttaattttccctctgaaatttcacaaaccagacctccatcttctgcagtgttctcaacattatcttccaagctcctacacaacatctgacagagctcttaacaatggatggatcttcaagcccaaagttccaaagtccttccacagtcctccccagaacatggtcaggttgtcacaggaataccccactctgctggtaccaatttgtcttagtcagggtttctattcctgcacaaacatcatgaccaagaagcaagttggggaggaaagggtttattcggcttacatttccatactgctgttgatcaccaaaggatgcaggactggaactcaagcaggtcagaaagcaggagctgatgcagaggccatggagggatgttctttactggcttgcctcacctggcttgctcagcctgctttcttatagaaccaagactaccagccctgagatggtcccacccacaaggggcctttcccccttgatcactaattgagaaaatgccttacaattgcatctcatggaggcatttcctcaactgaagctcctttctctgtgataactccagctgtgtcaagttgacacaaaactagccagtacagtggccttttgtagtaggatctgatgttgttttggatttcctcaggctctcttgttatgcctcctttttcatttctgattttgttaattaggatactatccctgtgccctctagttagtctgtctaagggtttatctatcttgttaattttctcaaagaaccagctcctggtttggttattctttgtatagttctttttgtttccacttggttgatttcagctctaagtttgattatttcctgctgtctactcctcttgggtgaatttgcttccttttgttctagtgcttttaggtgtgaaatcaagcggctagtgtatgctctctctagtttctttttggaggcactcagagctatgagttttcctcttaggaatgctttcattgtgtcccataagtttaggtatattgcggcttcattttcattaaactctaaaaagtctttaatctctttccttatttcttccttgaccaagttatcattgagtagagtgttgttcagcttccacatgaatgttggctttctatttatgttgttattgaagatcatccttagtccgtggtgatctgataggatgcatgggataatttcaatatttttgtatctgttgaggcctgttttgtgaccaattatatggtcaggattggaaaaggtaccatgaggtgctgagaagaaggtatatccttttgttttagaataaaatgttctgtagatatctgttgaatccatttgtttcataacatctgttagtttcaatgtgtctctgtttagtttctgtttccaggatgagtcattgatgagagtggggtgttgaagtcacccactattattatgtgaggtgcaatgagtgctttgagctttactaaagtttccttaatgaatgtggatgcccttgcatttggagcatagatattcagaattgagagttcatcttggaagattttacctttgatgagtatgaagtgcccctccttgtcttttttgataactttgggttggaagtcgattttattcgatattagaatggctactcaagcttgtttcttcagaccatttgcttggaaaattgttttccagcctttcactctgaggtagtgtctgtctttttccctgaggtgggtttcctgtaagcagcaaaatattgggtcctgttaatttagccagtctgttagtctatgtctttttattggggaatttagtccattgatattaagagatattaaggaaaattaattgttacttcctgttatttttgttgttagagttgggattttgttcttgaggctatcttcttttaggtttgttgaaggattactttcttgctttttcgagggcataatttcgctccttgtgttggagttttcctttattatcctttgaagggctggattcttggaaagataatgtgtaaatttggttttgtcatggaatactttggtttctgcatctatgataattgagagttgtgctgggtatagtagcctgggctggcatttgtgttctcttagggtctgtataacatctgcccaggatcttctagctttcacagtttctggttagaagtctggtataattctgatagatctgtctttatatgttacttgacctttttccattactggttttaatattctatctttatttagtgcatttgttgttctgattattatgtgtcaggaggactttcttttctggtccaggctatttggagttctgtaggcttcttgtatgttcatgggcatcactttctttaggttagggaagttttcttctataattttgttgaagatatttactggccctttaagttgaaaatcttcattctcatctatacatattatccttaggtttggtcttctcattgtgtcctgggttttctggatgttttaggttgggatctttgtgcattttgcattttctttgactgttgtgtcaatgttttctatgatatcttgtgcacctgagattctctcttccatctcgtgtaatctgatgctgatgctcgcatctatggtttctgatttctttcctaggatttctatctccagagttgtctcccttttggttttctttattttttctacttccatttttagatcttggatggttttgttcaattccatgacctgtttggttgtgttttccagtaattcttttgtatattctgaatactttggactatttctgtttaaggtagaggattttgttttgttttgttttttgttgttgttttttttactgttgtttcttttttttccttttttttattacatattttcctcaattacatttccaatgctatcccaaacccccccccctactcccctacccacccattcccattttttggccctggcgttcccctgtactggggcatataaagtttgcctgtccaatgggcctctctttccagtgatggccgactaggccatcttttgattcatatgcagctagagtcaagagctctggggtactagttagttcataatgttgcacctacagggttgcagatctctttagctccttggatactttctctagctcctccattgggggccctgtgatccatccaatagttgactgtgagtatccacttctgtgtttgctaggccccggcctagtctcacaagagacagctatatcacggtccttgcaacaaacgcttgctagtgtatgcaatggtgtcattgtttggaggctaattatggggtggatccctggatatggcagtctctagatggtccatccttttgtctcagctccaaactttgtctctgtaactccttccatgggtgattgtttccaattctaagaaggggcaaagtgtcaacactttggtcttcattcttcttcagtttcatgtgttttgcaaattgtaccttatatctcgctatactaagtttctaggctaatatccacttatcagtgagtacatatcatttgagttattttgtgattgtgttacgtcactcaggatgatgccctccaggtgcaaccatttgcctaggaatttcataaattcattctttttaatagctgagcagtactccattgtgtaaatgtaccacattttttgtatccattcctctgttgaggggcatctgggttctttccagcttctggctattataaataaggctgctatgaacatagtagagcatgggtccttcttaccggttgggacatcttctggatatatgcccaggagagttattgctggatcctccggtagtactatgtccaattttctgaggaaccgccagactgatttccagagtggttgtacaagcttgcaatcccaccaacaatggaggagtgctcctctttccccacatcctcgccagcacctgctgtcacctgaattttttatcttagccattctgactggtgtgagatggaatcttagggttgttttgatttgcatttccctgatgattaaggatgttgaacattttttcaggtgcttctcagccattcggtattccttgggtgagaattctttgtttggctctgagccccatcttttaatgggtttatttgattttctggagtccaccttcttgagttctttatatatattggatattagtcccctatctgatctaagataggtaaagaccctttcccaatctgttggtagcgtttttgtcttattgactgtgtcttttgccttgcagaagctttacagtttcatgaggtcccatttgtcaatcctcgatcttacagcacaagccattgctgttctatttaggaattttccccctgtgcccatatcttcaaggcttttccccactttctcctctataagtttcagtgtctctggttttatgtgaagttccttgatccannnnnnnnnnnnnnnnnnnnnnnnnnnnnnnnnnnnnnnnnnnnnnnnnnnnnnnnnnnnnnnnnnnnnnnnnnnnnnnnnnnnnnnnnnnnnnnnnnnnnnnnnnnnnnnnnnnnnnnnnnnnnnnnnnnnnnnnnnnnnnnnnnnnnnnnnnnnnnnnnnnnnnnnnnnnnnnnnnnnnnnnnnnnnnnnnnnnnnnnnnnnnnnnnnnnnnnnnnnnnnnnnnnnnnnnnnnnnnnnnnnnnnnnnnnnnnnnnnnnnnnnnnnnnnnnnnnnnnnnnnnnnnnnnnnnnnnnnnnnnnnnnnnnnnnnnnnnnnnnnnnnnnnnnnnnnnnnaagagtttttgctatcctaggttttttgttattccagatgaatttgcagattgctctttctaattcgttgaagaattgagttggaattttgatgggggattgcattgaatctgtagattgcttttggcaagatagccatttttacaatgttgatcctgccaatccatgagcatgggagatctttccatcttctgagatcttctttaatttctttcttcagagacttgaagtttttatcatacagatctttcacttccttagttagagtcacgccaaggtattttatattatttgtgactattgagaagggtgttgtttccctaatttctttctcagcctgtttattctttgtgtagagaaaggccattgacttgtttgagtttattttatatccagctacttcaacgaagctgtttatcaggtttaggagttctcaggtggaatttttagggtcacttatatatactatcatatcatctgcaaaaagtgatattttgacttcatcttttccaatttgtatccccttgatctccttttgttgtcgaattgctctggctaggacttcaagtactatgttgaataggtagggagaaagtgggcagccttgtctagtccctgatttcagtgggattgcttcaagcttcttaccatttacttttatgttggctactggtttgctgtagattgcttttatcatgtttaggtatgggccttgaattcctgatctttccaagacttttatcatgaatgggtgttggatcttgtcaaatgctttttccgcatctaatgaaatgatcatgtggtttttgtctttgagtttgtttatataatggattacattgatggattttcgtatattaaaccatccctgcatccctggaatagaacctacttggtcaggtgattgctttaatgtgttcttggattcggttagcgagaattttattgagtatttttgcatcaatagtcataagggaaattggtctgaagttctctatctttgttggatcttgctgtggtttaggtatcagagtaattgtggcttcatagaatgagttgggcagacttccctctacttctattttgtggaatagtttgtgcagaactggaattagatcttctttgaaggtctggtagaactctgcactaaacccgtctggtcctgggctttttttgggtgggagactattaatgactgcttctgtttctttaggggatatggaactgtttagatcattaacttgatcctgatttaactttggtacctggtatctgtctagaaatttgtccatttcgtccaggtttttcagttttgttgagtatagccttttgtagaaggatctgatggtgttttggattttttcaggatctgttgttatgtctcccttttcatttctgattttgttaattaggatgttttccctgtgccctctagtgagtctagctaagggtttatctatcttgttgattttctcaaagaaccaactcctcgtttgcttaattctttgaatagttcttcttgtttccacttggttgatttcacccctgagtttgattatttcctgctgtctattcctcttgggtgaattttcttccttttttttctagagcttttagatgtgttgtcaagctgttagtgtgtgctctctccagtttcttcttggaggcactcagagctatgagtttccctcttagaaatgctttcattgtgtcccataggtttgggtatgttgtggcttcattttcattaaactctaaaaagtctttaatttctttctttattccttccttgaccaaggtgtcattgagaagagtgttgttcagtttccacgtgaatgttggctttccattatttatgttgttattgaagatcagccttaggccatggtggtctgataggatgcatgggacaatttcaatgtttttgtatctgttgaggcctgttttgtgaccaattatatggtcaattttggagaaggtcccatgaggtgctgagaagaaggaatatccttttgttttaggataaaatgttctgtagatatctgtcagatccagttgtttcataacttctgttagtttcactgtgtccctgtttagtttctgtttccacgatctgtccattgatggaagcgatgtgttgaagtctcccactattattatgtgaggtgcaatatgtgctttgagctttactaaagagtctttaatgaatgtggctgcccttgcatttggagcatagatattcagaattgagagttcctcttggaggattttacctttgatgaatatgaagtgtccctccttgtcttttttgataactttgggttggaagtcgattttatccgatattggaatggctactccagcttgtttcttcagaccatctgcttggaaaattgtttttcagcctttcactctgaggtagtgtctgtctttttccctgagatgggtttcctgtaagcagcagaatgttgggtcctgtttgtgtagccagtctgttagtttatgtctttttattggggaattgagtctattgatattaagagatattaaggaaaagtaattgttgcttcctattatttttgttgttagagttggcatgctgttcttttggctgtcttctttttggtttgttgggggattactttcttgctttttctagggcatgatttctgtccttgtattgttttttttctgttattatcctttgaagggctggattcgtggaaagataatgtgtgaattttgttttgtcatggaattctttggtttctccatctatggtgattgaaagtttggctgggtatagtagcctgggctggcatttgtgttctcttagtgtctgtataacatctgtccaggtatttctggcttttatagtctctggtgaaaagtctggtgtaattctgataggcctgcctttatatgttacttgacctttctcccttactgcttttaatattctctctttatttagtgcatttgtttttctgattattatatgtcaggaggaatttcttttctggtccagtctatttggagttctgtaggcttcttgtatgttcatgggcatgtcattctttaggtttgggaagttttcttctataattttgttgaaggtatttgctggccctttaagttgaaaatcttcattctcatcaactcttattatccgtaggtttggtcttctcattatgtcctggatttcctggatgttttgagttaggatttttttgtgttttgtattatctttgattgttgtgccgatgttctctatggaatcttctgtacctaagattctctcttccatctcttgtattctgttgctgatgctcgcgtctattgttccagatttctttcctagggtttttatgctccagcgttgcctcactttgggttttctttattgtgtctacttctctttttagtctagtatgtttttgttcatttccatcacctgtttggatgtgttttcctgtttttccataaggacttctacctgtttggttgtgtttttctgtttttctttaaggacttataactctttagcagctttctcctgtatttctttaagtgagttattaaagtccttcttgatgtcctctaccatcatcatgagatatgcttttaaatccaggtctagattttcggttgtgttggggtgcccaggactaggtggggtgggagtgctgtgttctgatgatggtgagtggtcttgatttctgttagtaggattcttacgtttgcctttcaccatctggtattctctggagctagttgttatagttgtctctggttatagcttgtttccacaggtgattatgttagcctctatcagcagacctgggagactagctctatccttagtttcagtgctcagagtactctctgcaggcaagctctcctcttgcagggaaggtgcccagatatctggtgtttgaacctacctcctgacagaagttgtgttccacttaccataggttttaagatcccgtggcggatcctgtgtgggtccagagactccccgggccagggaccctggtgctgcagtgggcaggaagggacttgtgccctggatcaggccgggttatctgcttccttaattaatgcagtctcgggtcctgcacgattggattggagcaggtgctgtgttccactcaccagaggtcttaggatcccgtggcggatcctgtgtgagtccttgcgggtgtccggagactccccggtccagggaccccggtgctgcagtggaccggaagggacttgtgccccggatcaggccgggttatctcgttttcctgtaattctttaaggggtttttgtgtttcctctttaaggtcttctacctgtttagcaatgttttcctgtatttctttaagtgagttattaatgccctcttcaaatcctctaccagcatcatgagatatgattttaaaatacaaatcttgcttttcgggtgtgttggggtattcaggattggctgtggtaggtatactgggttgtagtgatgccgaatggtcttggtttccattagtaagattcttatgttttcctttagctatctggtaatctctggtgttagattgtactagctagttttgtgtcaacttgacacagctggagttattacagagaaagaagcttcagttgaggaaatgcctccatgagatccaactaactgtaaggcattttctcaattagtgatcaagggggaaaggccccttgtgggtgggaccatctctgggctggtccttcttggttctataagagagcagtctaagcaagccaggggagtaagccagtaaagaacatccctccatggcctctgcatcagctcctgcttcctgacctgcctgagttccactcctgacttcctttaatgatgaacagcaatttggaaatgtaagctgaataaaccctttcctccccaacttgcttcttggtcatgatgtttgtacaggaaaagaaaccctgtctaagacatagatgttctagctgtcgctggctgtagcttgttcctcctgtgattctcttaccctctgtcaggtctcctgggagtccaactctctcctgagtcccagtggtcagagcattctctgcaggcaagggaccctgtctaagaagctctgttgcttctgaggcccatgtgctctctcctgtgtggactggtctctgagagacccgggataaaagatggagttctcacctgagtcccagggtcagagccctctctggaggccgactttcctcagtgatcctaagatcctgggtgtgctagggcgcctgctgcgtggagagtcatctggggacttgggaccatctgctgattttgtgcccaaggtggcgcagtgcttggaaggaacttcagccactggtcaggctgctggtcaggccgctggtcaggtgggtttcctgtgtccctgtccttgctggcccaagtccctctgggttgttttggaatagatgttacgttccactcaccagtgatcccaagatcctgggtaagctaaaaaataacccctgcatttctgagcgaagtgactggtgtgcagctcctgctccagaattgccttctctcaacaagcagccgtcctggtagtccacacaactcaaaatgtctgcttaccctagaaatacacttttagaacaagaagatatttcattccttgagtttctgggtgaagaaatcatagcctagagaagtttaaagacttgttcaaaaacaaagatcttacaagaggcaggctggaactactctgtgatacccagctgcttttgaatgggccacattgctgcacatgtagtcctcctaatgcttagctgaaagattttagaagacatatatgagtcttttcatctcctccacaggcatacgaacagtgatcgctagcagtaacctatgtgcatccacaggcatatggacagtgatggctaaaaataacctatgttcctccataggcacaaggacagtgatggctaatggtaatctatcttctctataatagctgcactccaagggaaaacttcctggaaccagaatggcagagttgaaagccaagtacaccttgctacacgatacagtggtgaggtatgttctttgccagcaaggagtcaccttttatcgtctctgtacttcttccttataacaaatgggacctgtcttcatttgtcttctctctgaaatctggggcaaagatcagagttcaggtggttttagaaatcactaaagaagaggttgtgaatgtgtgaagaagggagactgaaaaggaagaaaccaggtggatggggtcatctgtggctcatgttgtgggcccagtgtcacagacttctgactagagaacaattacagctctgctaccaggaagtgacaaagccagggtacttgtccacttgtttgcaccactcattaggaattactcctgaagaaaagagctcttgaactttgagatgacaaacgtgcatttctcaggcagagtaggcgctgatgtgtgtatgatgactattgaagatactttggacaagaagacccctctccaattgtcattcagaagtatagttctgtgagagcttaagttcaagtcagtagaaggtcagaagatgggcatccacagaataagccatcagctttgcccagagcctactacttgccactgggtattgaagctatttctctttagtgacaagctatcagtgcaggaccaaaactatgtagtgacatcttctgcttccagcttgtgttgtgaaatagctacttcccctctgctgctcacagtttacctcctccagagcctttacttccttctctacctattacaaaacccaccactctctctcaagcccattggaaaagcacagtgaagcagacactatgtttttgtggctagggctgcaggcaggcagatatgggttggaagtactgaacccacatcgactgagctttccacaagactacattagaagttaagttctctcctcctgacactgtatgtcacacgagtatatgtgtaaactaccacctatgttctgactggaagctcacttctgtgttgccctcctctccatgtggaagaactctagggcctggagacctgtcattgtaaggagcccaggttatgccagatgaacacaatgttaacatacaagagcaccgaagcgtaagagaacagctcccatttccattcccggaaattggaggagttttcaccagtattgctctgcttgctctctggcacctaccatagttcctggaacatatgaggctccgataaatgtttggctggatgccactaaacacatgacacagtaaagcgtgagaaaatagggtaagggaagcctgttacctcagctaagacagcctcaatcctgttttaggacatctttgcaaataagctgaaacctagagatttttcttggtaagaacatttaatagaatacacacatagaagtaggtgttagctttaaaataaaatagcaaaggcctgcctatggctgctgggtaggggatcactaatgtgagggtgtctgagacagataggccatgtagactataagttgggtgccagtactagtttgtaacatgcaagacttctggaatattcttgggatcagtcaagtataacttttcttatctatccagatctgcagccacttctttaaaccgggacaaggtcacagaatacagctgggtttttaggaactctcttttctgtgatagtcaagactatttttagccaagcatcagggcaggattaaaagctgattaatgtgcataattttataggggaatttttcctagtttcccactaatggctgttaaaaagagtgcttaatgtcttagatctgtaatgaaaaaagatcttggttcagtcttacttagagaattaaaagcacaaaaaaaaaaaaaggaaaaagaaaagaaaaggaaagaaaaaagaaaagaaaagaatttctgggttatttgaggggcccattacttttttttttccccttccttgggagccctggtctttcttcaaagtcagagggaatatcctttggattacttgcctctactctgcttctgcttgcccctactctggatctagggacctctggaggaacttatgaggggacactgcagctgactgtgtacctctcccagctagagggtgggtgactcaggctagtcgctgagccttgttcttgccagtgctgagacttagtatgactgatcaaactgaatccaggagtaggaacatctgtgacatgttcccatcctacccccaaatcctctcaggaatacggggcggggggaaggaggggtgtcctgaaggtacacacgtcccccctatcaatatctcaatgtctttgaaacccagcacgcaggagtctgaggtgcagctactggagaacgccaagcgcttcacggagcagatccagcagcagcaggtctgtctgcagcaggccgaagacttccccaacgtcttcaccactgaggtctgcaaacttcgggagcagctgctcaagtaccaaaatgaatacacggcagcgcaagaaagggagtacaatattcagtacaggctgactaggtgagtccccgggcgccctggagacagcttcactgtcccatagtctgtgcaggctgactaggtgagcccccggggccgccctggagacagctccactgtcccacagtctgtgcaggctgactaggtgaggtctctacttgttggagacaggctgtttccacatgacaagttaatttgggagagggtttaggtataagaagtctgagctaacaattacaagcccggttacatttccccttggctcccttcactaaaagatcacacaagagctgggcaaagaactctggaaactgaaatcccttccatgtttggagctttggaaactgctgggaggtgggaggtggggggagggaggaacagagcggcctctttgctctcctgcccttcctcttttgtccctctcttttcctgtctcctggatagctgtggctcctgacatcatgttgctaggcacccaggtcacatcccttcactttatcttctaacacagcagccacaggaccctgtaagttaacttttgtcccttcttactaaagaaaagtgacatcctcatggaagagtcatttgcttatacagacctagaggggactcactcagtgaagcaaagcaggtgccagtgggagagtgaacctgtttcccaaataccccctgcttccatggaagttcagcttgcacctctgcatggtgactggaattttgagctgtgatgtgccagtgctgtgcctgggtgctgggaagaaagttgaacctgccctcctagagtctgtttctatttaaggtggagagctttggctatttttaacagtatgtagaattcagacactacaacataactcagccctgcatggagacagcaaatgcctgagtggcttccaggcaaccatgcgaacccccggaccttgagatttttccttctggcttatttttttcaactgagagatagataaaggaagcagtttaatgaacagaattctattcagaaagaaaaagaaaaataggcggctttttttttttctatgtgtctttcagtctaaatttgttaggactctccagatagaactataaagggaaaaccagctatttccgtgagcactctttcagctgaagaaaataatgaaattaaaacaattggtggttgttcattagtcttgcaaataggaattcgtgacattttgtgaaagggtacagaacacataagtcagctggttttttaaattgtttaaaatttccaagtattcctgccaagaaaaaagaattggggtgggggtggagggtttcttgacttttaggtatagacaggcagactgttcaccaagctccttaagataggggaagggtggtgtattgtcacttacgatggatgagaacaaaagcatgtggcactttacagtgagcagacctcctgtatcctctaatatcaatatctccagaattaataagctcatctccataaaaacaattttgttagcaaagggaattccagggaagaataatgggctttgtgtttgttgtctgttgccttcacacacttgatattatgtggtacagaaataaatccactcaacactcccgggggaaaaaaagtaggcatttccatccatagataaaaataagcaaagccaatgagagaatgctattcatccaaatatacagatgatgttggtcagttcagcacagtaaactatcattgtattcagggcctaaataatacaagcccaagtggccaacatcctctaccccagcatcttcaggaacgtctgagtcactggtgactggcaagagcaacatcaagttacttttactttggcttctctcctcctggctgctgccactgctggctcctcctgttccatctcttcctcttcttctgtctccttcctcttcttatactttttgagacagggtctcaaaaaccagaccaggctagcctcaaagacacagagctctgtctgcctctgcctctgcctctgcctctgcctctgcctctgcctctgcctctgcctctgcctctgcctctgcctctgcctctgcctctgcctctgcctctgcctctgcctctgcctctgcctctgcctctgcctctgcctctgcctctgcctctgcctctgcctctgcctctgcctctgcctctgcctctgcctctgcctctgcctctgcctctgcctcccaggtgaattaagggcatggccaccaggcccaacagctgttttcacacagattaagctttttaatagatgctaatggttagtaaattgttttgattagttaataattaatctgtgttacacagttttagtttagggatcatacttaaatatagataaataagtagttaaatcatactgcagagagcttattttgcaaccaaggaagttgttatttttctaaaagctttctctgataaaggttccaatattctctccaacgttcccctttcctgttgccttttgagtttccctggtttccagtagttcttgaaatttgggcagtcggtacaacttgtttcttggtctaactctgacattttctgacaagctttggtcagttggggaagcaaggcagtaatcagtgacctccagcatgctatggactgagagcagcaaccctcaagctgggcatgtgcaggaatgtcctggtgtctgggtgattctctcagtttcagtgactagtgattgtagccttcaggcaggtttgttcagttaggagagaacaagggttatttgaatatgaggctaagagttaacatgtactcactctagtatgtggcatgtattaccataacaaaatccagtcttgtcccagcaatgccatgcgaaaatgaaaatctaaaaaaaaaaaaaagtaaaacaggttaaatgtaatctgtcaacattgtgacattatttacaaatgtaaaaaattgaacgtccctcggagctcttgactctagctgcatatgtatcaaaagatggcctagtcggccatcactggaaagagaggcccattggacacgcaaactttatatgccccagtacaggggaacgccagggccaaaaagtgggagtgggtgggtaggggagtggggggggggtatgggggacttttgggatagcattggaaatgtaattgaggaaaatacgtaataaaaaaattttaaaaaaattaaaaattgaacgtcatctgaagttttgaaaagctggttgtctttcagcaggttgtattcctgtattctgttgcctggcatcaactctggagtccccatacctgtcacagccagaactgtgctggggggaagtacttatctctggtttttgtttttgttttttgttttttgttttttgttttttgtttgtttttgcacaacctggcaaaactatggagcgtagaaatgtgtgtagattcctgcataggataggcctggtgtgtgataaataatgcttagaatcattttatcatagtatctcctcccaatagaaaaccctgagaataactattcaattactaattgtggaatctgtttagcaactaggaaaacattatgtaatttcgacaaaaatacactcaaccatgcatatgcagttaatataattttactaagcatacatggaagaatgaaaggaccaccatggtacacagtgttattctttgagaatagaagagtgcaccttttaaaggaaataaaagtccctgtttcttaaaggagaaattccttaataggaatacaaccagccttcacagtcctagataactaaccattctgtttgttcaaagaaaacgccattttgtatctatttaaagagaagactgcaagcccttatcttgggttcatgttagttaccaccattgtttccttcatcagcaatggctggcagcactcaaacaccccctggtggcagcatgcccaaagtgctgtgtagcaggtgaagggaaaagataagtctaaggaccaagtggtaaatactcaaaactgaaaaaagtcagcttgaatctgtgctcatttatattaggttccatgtgtcaggcatcatgaaactatcattaatgtacatcattaccaatgaaaatatgctagaataaaacctgatgcacagatgtgtgtctacccgtggctccttgttcctggatcttctaattggtaggatcggtttgattcagtatgaccacaatgctccacccagcccaaatctcatcatagagttaagtgattctagatgctttaagtctggctgtgttctcttgctgaccagacacagcattgcatggagaaggcgctgcgatgataagactgcagcagggggtggaatcgttggagaaggggaagcgtcagatagccctgtgatcaggcatcagagcttgagtgagtctaatggcgcttttcctgtccactctagccctttgaaggagaggcagggcagtattagatggaattattttccatctttcacccagaaagtcagagccaactagacttgggtgttttaattctcccaggctgcttagattctgataaaaccctccaagtttaccctagagatcaacagagaaaaatccaactcttctgagcttcctgatgaggggttagacaaagcttatggatataaactagttgctcatgaacttcctggcttaccctcaagctgcatatttgtagatctgatcccacacagcccgcagaaactttgagaactagctaagtggtcagtcagctctccaggtcccaacaggaaagctctagctagcaatgcaaaggtgctgaaaattaaatcagtctaaaaaccatagttgccagcagcattggctggatcttttgacctgacctgaactgaaccatgtctactaaagccaaaatattaactgttttcatgtttctgagtaaagcctagaatcccatcacataaccattcaacagttttcccatatgaagaaccaggcaaagagagctcagcttgcctaagagacagcagatgtcagcctgcatgctagaggttcctgagttaagtgacaaagacctccctgcagcttttacatgcacacaccaaaaaacaactccaaacatcaagactaacggaggaacaaaagtctcagaagctgcatcttaagaagaacatctctcgatgtcatttatttccagctgattcagtttttcactacaaaagtaaccccaaaacacagtcttagatgcagccaaatacttctaagttgttcatgtggggattttataactgagaaatacagtaactgaaaagttaaacaatcaaccgatgggtgaacagaagattgaaagtaagaaaagtcagtgactccaagataaatagaaaatgctctgtctggaaaacagagagagtaaagagagagaacctgagaagcccatgggacagtagcaaaaagctctcacaccgcaaaagaggcaagaagtggagaagactcaagagtaactccccggcttgtgcacttggacacgagatggggtagacaatgtgaggcttcagaggggaacaaagggactctaactggaaaagtctggctttgtctaccaagagttgagaagtgaaaacttgccagttgagagaagttccaaggctggagatactgacttggaaatcattgcttgtcactggaactttggaaacagaaaggggaatagaaaggttaggctccagtgcctcggggaaacaatagtacataaatcttactgtggctgtagaggaatgtgacgtgtatttatgacctggtgtgatagtgcacgcctttaatcccagcactcagaaggcagaggcaggtgggtctctgcgagttcaagaccagcctggtctgtgtaacacgttccagaacagctagtataatgatgatgagttgatgatgatgatgatgatgttgatgataataatgatgatgatgatgttgatgatgatggtgatgatgatgatgatgatgtaattattttatttacttatatcccaactgtggccccctcctggtccccccttgaagagttcttcccctcaccccctcctcttcacctctgaggggatgccctccctagatatccccccacccctggagcatcaagtctccacaggattaggtgcatcctctcccactgaggtcaggcaaggcagccttctgctacataggtgccagaggctttggaccagcctgtgtttgctttttggttgggagtggccctatctttaaaaaggggggtggggaagggaaaagtgtgtttctcgttctgacatagttcagtgaaagtcaaacagcccccatcctgtgtgcttgccaagtggtttccattcagtgtggctgggaaggcaggtgacaatcaccctccattgtccccagtccaaatgcaagggaagctataaaatgcaaccttcttatgtactcaggaagagggaaggatatgacagatataaagtgtgtttgtcacagggactaaacacacatgctccaagagcctctgcttagtttcttctgctccaatgctctatgtctctcagtggtgcttctctgtaataccattcctgaggaatacaaatgtcatgtaaaatgtgggagctcttgggatgacccttattcacagctgtgaacatctgcagggtcttcccttcatgatgtccatggtactttcccaactcagatgtaaataacatgaagcaatgggtcattcttccagcagctctatttctctgtgtgactctttatttagtatacaaattatgtatttcaaagaatggaaataggaatcaaaccaacttggaaccatccgctatattcctgctactaattatcaagtgccaactatcttctagcaatggtggcgcagtgtaaaaagagcaaagtctctgtccttgcagagctaacacatgacaaaataccaggcagcgaggagcacacatggaagaataaaacaagcctggtggggattgttagtactgtgttaggaggatgatccagagtaagccaggcagaggaatcgggcaggccagagagcctgcggttggaacagattcaggaagaccaagttggcgagagggaaatgtgtcaagcagcaagactggagaggcagatgatgtggagtttcaacttggtccaggtttgactagatgttattgagcagaaaattgatgggatcttgttcatgttgctaaaaatcactgaactgacggagggttgaatatcaggggcaagggtgaagtcaggcaaggcagagcctttggaaggccccagtagtaattcaaggcagaaacatgtagacaggaaaaagtccagagcctgcctgggaggagtcctaatccacagggatgcccatgatccaggacacttataataacatacccagagagctggcgtattaggtacgaacatatgttgctgctggagtgtgggcagaaggaaacacctaaaggccaaggagcgtcagagccatcactgagagaggctaggatgtgaggagacagcctgggaaccctctaagagagagggcactaggatgtgaggagacagcctgggaaccctctgagagagagggcactaggatgtgaggagacagcctgggaaccctctaagagagagggcactaggatgtgaggagacagcctgggaaccctctgagagagagagcactaggatgtgaggagacagcctgggaaccctctgagagagagggcactaggatgtgaggagacagcctgggaaccctctgagagagaaaacaggaaggcgcaggacagaaacagcttactctttggtacattttgtcaaacatggtattttcttttggcagcttaacagaagaaaagagtatcatattaaaggaatttgagaagatacctaagccaggagtaagtattagagtttattaaattcagctgtattcaaaaatccctttaaaaataatagcacaccctgagacatttgaagcaccaataatccagatgccacgaggaagatggacatccttgtgagcaggcccaagccaggcatgctataggctttctgtgctggtgtctacactaggctgtgcttagtcacaaagcagtacctgctttgtttctagaagaaaataagtttctgtgcctgtcacttaagaacatctcttctgttgttactgcactcagaatgtcctgagcttctcagacctggttcataaagacaacacatcactgtcacaccatgaccaaggcaacatggaaaagaaagtatataatttagagcccatgattacacgggtcagtagaggctttcgtggcaaaaggcaggcaggcaggcgtggcactgcagcagtagctgagaccttatgtggacccaaaacagcaaggcaggcagacatacatggagagacacacagagagagacagagacagacagagnnnnnnnnnnnnnnnnnnnnnnnnnnnnnnnnnnnnnnnnnnnnnnnnnnnnnnnnnnngggaggagaggagaggaggggagggaggggagagggagaggagagggagaggagagggagaggagagggagaggagaggagggagaggagaggaggagagaagaggaggcaatttaaatttgaattttagttacagacttaggtaacttattttaactccttccagcagtatgtaggaatctcaacaaaaactcagagcaggctaatcaatctatccacttggctattattagcagatagcccttctgaatataagaaggtgtttatctgtaagtcaagcccactccagataataaggcagaggaaaccaagtgtcccgtgagcctgacggaggatgctgaggtgctactgtgtggagattcgagcctcctcatagttagccgccgtgtatgacttaggctaaccacaagacagatattcagatgatttgcatttgactttgtcaaatctcaacgctacaaggaaacagaatgtacattttcacagtgcttcttagtatgaaataaaaattaacacagaaaacatttaaaatatgaagcactcaattttaaaaagtacttcaaaaccgtcacatgcttagttaacatggtataatcgcatgctgtgggtgaaggtatcaggcataataagttcccctgaacttcctgggaatcacgagtcttagaacatgtccagtggacacggtggatgcgatttgattttagtcccattttaaagtggatgagcattcacctggactgtctagctgaccattctcatgactcttcaaggaaatagagaagaagacgaggctcctgaaagaaagcactgaggaactgcgcaaggaggtgattcagaggagactggagatcaaaaacctgcgggaagatgtggtgctcaagcagaagcagctagtgagggagcagaaggagctggaggagctgatggagtatcaggttggcttgaaggtacgttgtcgacaacccatgactgtttaaacgtggtgcctatgtggatataaaaacctagggatggagagtagctactctacgtgaccaaaggagctgtcacacaaacgctagggactctgtcaaatgcaacttaaattctgagaatgtataaagggcatgggggtgtttgatcagaaaagacatgtgaaagctcacaaaagctgtcgtaatttgcaggcctagacttggcaaatgggccaccaacatttgcagtgagggtcacaaacacagacgatttcttgaaaggcagagaatgttcatccctcttgtatctgtttgtattgccttatacttgtatgcttgatcccactcttcctttaactgtaaaagtgactaggagcatatattaatgttttaggaagcaattagttgcaattaattttattttgaaaaatgtataataattctcaaaacaatttaaattatttaaagaacaactcccaaaactcattggcctagaaaatactcatgattgtttctgaccttttcccctcttaccacatacccatcttatctggggtataggaactaagaagagagtcctttgccaagaacccagggagcttcagcttccagcacatcgcgtctaggaatctcttccaaggacttgtacctaagttagaagttgtagctttttacttgaagaggggcttcaaattgccaaacttcagccctgtaaagcctggatctgctccaggattaagcaggatcccacagagaagcacttcatcctgtcagtgctgtgtggtgtttagctctcacactcacgtgtggttccagagctcacaatctcctgagcacctcagataagcagggtctctttcattacccctaatggaatacctacagtgaactttccactaatgcatacagcttgcagatcatgaaggtccacaggcttagcctccaaccttggccctgcatgtatgacccgtgtaactgtaggccatgtgtttggtttcttttgttgttggtttttgtttttcttgtctccttcacagtcggaggctgggctccctggaagcagtatctaagacccttaatgtaggaggaatctatggagttcacagtggagtgggatagagctaaagaagatgggctagatactgtttctgctgtagaactctagtcttggcctggcaccagaaagaaccctagatctttaactgaaccaccgaggcctgagccaaggaccatgtggctacatcattacatcattacatcaatcattacatcattacatcagctagtcactggccacagccttctccatacttccttcacctctctcacatgagggaagagggaatcttagaggggcacctgtagctgtcctactctgtcatctgctttttgagatggtaacaagtataatgacctgataaggccagtgtgaatattggaggaaacaaagtgtacagggtagatggtaagaattctacaaaatttagtttttctctcatttaatttgcttgcatagttgactacacaacttaccatgattgtatttctttaccaggatgacgtggtccaccatcaaagtgttcctgtacaaattacaaaggagatagaaaaaatgacacgcaaaaaagtgtatggtttaatatttttattctaaatccctcctaggctacctctcccaaataatgtgtgtctatgttataatatttacaagttataatcttgaaaatacctgatcttggtcccatatgggctctatgattcatgttctttaaaagaaaataatacagcaaatgataataattctatttcaacttataaattctgtttctatggagaccaccagtgacttcatcaaggctggggattaaccatttgaacttaaatttcatggtcccaaatgatgctcagacaaccgcagcccaaatgatggcaattcctccctttgcatagattcaccctcagacaactagagcagacttgagtatgaagattgctgagaagctcttaggatttcagtgatcaaaaagaaatacaagattggtgcatataaaaatattcttgagaaataacgtgattactctagaaactgctcttaaaagaatacaggaaaatggagcagtggtgattctaaaacccaaggtcaccagaagggaagttaatggagtcaagtctggtcctggaggctagtcacaatgggagcagaaaccacaggtgacagagtgccatctgaggagaaaagagaatgggcaaatgcctgttttcaggagcattctaggaagttatcccctgtccctccctcccctctccctttccttctccttctccctccacctctgtcctcccctttccctcccctctccccccccctctctctctctctctctctctctctctcgtgatgaaataccctgacagaaaacaacttagggaagaaagcagtttatttcagcttacatttccagaacacagtccatcatcgagtggatatcaaagcaggaatttccaacagtaatcatgacacacatagtcaagagcagagagatgggaaagaatttatatgcttctgcctgcttgtactcagcttgatctcttccctcttatacaatttaggatctccctgcctaaggaatggtgccacacacagtgggctgtgtcttcccacatcaatttacttaagacagtctcccacagacaagctcattggccaacccaatggagatcattcctcactgagaatctcttcccatgcaattcaagttgatgaagaaagctaacaatcacacctccaagtatctcctatctttgacctttacatccttctaagctcagtaaacttgtgactagtatatttttgtctgataataggtagagacagcatgaactcaaaataagccctcttacttctgcttctgtgtgtactccctacagagaaacagagaagaaaaatattgtcttggaatctgagttgaaagagctaagtgactctttaaagaagcttgaaaacaaagtcaacactcttgcggaagaaagggatgacataatgaaggaagttgagggcaagcgaaccttactagaagtcaaagaacgagagtatggccaactgcttaaactattggaactaaccaaagagaacgaagcctcctcgctagctgaaaggttgcttatatttctgcacattctgtcatttaaattttaatcaatgatgtcctgaagattcaaaatattaccaattgattgtatgctgtttcaataacaagttgtagaattataagtcaatttttaaccattaattaaatgtaccatcaaagcactttgaaatatttttcctattctttaattaaaatttcctcaattctatgattctgaacttaggaataaaatctattgttgactgtaagtttatggggaactatattgctgaaatatgcaagtaattcagacacttgccaatcagtgagtagtatttctgacataatcccagcattttctggatgagggagatttcatggtgtgattccatactggaatattttacttccgactctgtgtatgtgtgggtggggtatccacatgtattcatgagctcatagaaatcagaggccaacctctgtgtcatccaccttgtcttttgagacagagcctctccttaggacctcggactccctgattaggctaggctagctggctagtgagctccagagatctggctgtctctgcctccccagcactcagattacaagtgggttctatcagttaaagcttgttacatggatatagggggctcaaatcctgtttgtgtggcaagccttttccaactatagactctcctatcccctgacttttcttaaatgctagaggttgaacctgggactttgccctggtaggcaattgctctaccactggcctttactttatttcttacgttaaagtaaaatttcaaggaaggaaactcgaaacccatgactccccagcctatcattacatttaatttataagattatacttctaaatgataccaacacacaaaagtagctgatttgggtttcacttatggtttatggttgtaatgtgaaaaaacttctgtgtataaccttgagcatgctgtctttgataagcttagaaaactgtataagacaagtcactttgatcttcacgcttgatctgaacagagggatcttggatatcaatctacggaactgtctcatcgacaagcagaactaccatgatgaactttctcgtaagcaaagagagaaagaacgagattttcggaatctgaagaagacagagctgctcctgaaagtgtctttggatgcgctcactcaggcacaagccatgaatcaaaggcttctactagaggtggatatgaaaacacaacatctccatttgtttaagctcagggctctctatgaaagtaaaagtgttgtgcttttgctatcaatagaaaaaaagggacagtggggtggcaatttgaagatgtgttatccccttagactgctgataaccctgtaatatttcccacatctttttctagcccaagactagtcaatttttttgttttgttttgttttgttttgttttgttttgttttgtttgattggcagagggataattggtccagccaatttggaaagagcctagacaataggcctctatgcagtatatagtatatagtatgcaggaggactaagctagatatttgggtttaaagagtcagatctggcagttaaggagcaaatccgattgcataaatgtctatagttggttggccatctggactactagctaaaggacccagtatcaagctgcctgactagttttgtgtaccaccaaaagaggactctagtcaggggatgcttgaagtaatgggatatcatttgactacttctattcccagaggtatgcccttgctacctgggagtctcgtttctttcagacagcatctgctgtgcattccccatgctcatggaaaggcagagggtccttcagagggctgactccttatgttgaaagctgtgttggtacattctttgatgaaaatggggtcaggtctctgaaatgtgacagccgatttgcacagaacccattctctttagaattatcgtgttctgggatcttgtgcatgttcatgaccttggaagtaaatagtcaactcttgtagacatgtctgaacctaacctgcacctggttttcttctcctagattcatggaaagtttacattgcttgtgccctttgcatttaagaagtcacataactgtgtcaggccagtgtattgtaggaagaagtgacatgccatttttagctcaaggcattttgttgccagtgtgaggccttctggctctttctattgcctgtggtaattgtggaaggatgttatggaatggaagtgctgtaaggtgggaggaatactgaaccatagaagtcttgttactgggctcaagtgatgatagctcagtgattaagaacactggctccttttcagaggacaggggacaagaaattcattcccagtacctacatggtggttcacaactgtccatagctcccgttctggtactatttcctttcagcctctctgtatccttatttatgtgtacctcatatacaacacatactcttacagtctggccagagaagataacaccttttcagtcttatgtttagctcaaatattaacatgtaatgtaattgtaggcagatttggactatggccacacaacagcagtttctttgttccatatgcttatattctatcttctctcctttgtctcttcttttagattcaccagtgttcactgttattgttttcacattttagatactgactggttgggtttacattgtccttatcctttcaatgatttactggaaagagtagaacagtcatccttgccttagtagagcccagtggaaactaacactcttcctgttcccaaatggagcctttgaagactctcactctacttacctttgtaagtctaacccctctaaacacgcttttagcatcactttgaaagttatttttattgaaaggttgactaatttacaagatactgcttagcctagagcacaacacatcagaatgttaaactggaactctgaacacacagacttagaaggaaagaagccctggctttcatcaagttctcttcttaattcaatgctattgcttcagctgaattctttgagatctcttcatatagtatgcaacgtcatacagcatgccccgtgtttctagtccatctgctggtctcggggaaagcaagcatgccttctggtgggtccctgagaatgagaatagaaagcaactgtgtctcagaaaatgtgttatagaaaatattttctcctcaggagaagcatagatttaaaaatgtctaattggatgtagaattagttttgacaaatgattttataatttttactggagaagacaagaatatgactctctttttggtccatctatataccacatggttggttttgttttgtttttgtttgatttgggcttttttgcccctccatataccaaatattgtcatgtaattttagatacttaataacttggtagttacattactataaacaagttaggtctccacatacctgagtcagatagtaaatgcacaattgactctgttacaagttgtacatttctgagacgtcacgaacatcctgactctcgtttgcatgttttccctgtgattgctagtttaactccaaactctgctcaactgcacacatttcctcaagaattaaatgcacacttgacaatctattcatttaatttttgaagaaatggtttctaattgttgccactgacttctaaaagccaaagggacacaccccaatagctgaataagttgagttatttcacatttcaacaaaggtgaacaaactgtagaagtcagcctttgggcttctggtatgtgttagggagagagtttaaggaaagagactctgtcatgagtttacatgttgccagaagatgagagtaattttgcttgactgtattaacagatcatagtaatcaaaagagaaaagactagatggcagaaagctgtagttggtagagaaggctgtaagtggagaaggtataacacttttgtggcttgggcaatgttcatattttggtttgtattcaaacacaattatggagtggttttgctttcatttcattctagtaaaatcacagaatggctttgtcttcaagttctgtgaaattgatgatgtttcagtgtcagtagcagttaagttcttggacccaataacccattcattggccactgcccagagcgcacaataatcagaaacaaggaccatcagaccaatcccttccactggacttttcatacttacattcaatccagaaaggagagcaattgtaaacatgaaggtccagctagtctttagccttaatttagttatctgattccctgtggtctatgatttacaactagatcctcccacaaattcaaaacagagtctcaaaaatgttaagaaggtttcagataaatatccaatgattacactgtatgctgaggttcactagtctcaactgggatgtttactgcaaaagaatgatgtctaacatcctaacttttacaacagtctgacttgtttctcatgcattgaaaatatctataagaacattgcccagccattaacagaaccttctagggagcaacactggtagcaaaggtagagcaggaaagattttttttatgtagatctactgtatgggtacaatgaatacattttaaacatgaaataaaaaccaaatctaagaactaagcatacacaatcatataaaacttggccacatatgcaacttggggctcaaagttaatcctaagtgtttgacatcatctttgatcccaaaattgagaagctatttttctgacacttcagtggagacttcagcatgacctttaacatgttttggagatgaccgttagaagatttcctttcaaaagacagcaattaggtttgcagcttggtttcagtgagtaacagaaaactagtgtaactctcctaagcaagagaacattttgttcgtataataaaaagtgtagatatgggtacatcaagtaatttcacatcacaaaaaagctcagaattattttagctctctcttggccatctttactgtatttcttctcaatggtcacaagatgaccattccacaagaaagtgatgaccagcttggctgactttgtcttttataaatatgtttatagtatttctctgaggatttgccacatattctaattgtattcatcccaactttcccctccagctcccccaggtccaccctcctcaatcctccccctccctctattttatgtcttcttttcaaaaatctttttggaagtcccagtgtttcagattcctggttctctggctttcacagtctttctggcttcttcccgagtctcagtggagggttctgttgcagatgtatctattggctggtcctggccacctctcacttggttgctcactgcagtctggccagctgcagccttccatgatgttgtacaaaggagcttcttggtgagggtgagagccatacttctccacggctatcatggcaagtatttagtgtgcagttagacactatcctggcttaggaaagaggtggcataggttttcctctggggtcggtgacctcatcagtcatgagtagtcatgaaacaggcatgaattccctcgtattgagggtcttaagtgaccaccccaggatataggccactattgtacctttcagaatatcttgacattctgatggttgtggttcacaggcattacagctgcataagactattgattgcttttctcccttggcagctccttttgttactatgagagctagttcttggggtagaggcttccagctcaggtccagctcagttcctccaagtcctgtgtctgaagtgtatgtggtcagcaatcgggtcttgccttctttctctgaaaggcaatcaaggacaacaacaatagcctatatagttttgggggtagatctcttggactcctctgatcagcaactcaaaaggtttcccatacctgacacttgagtttttgctagatggtctatagtttgggagagaacattgccacccccaagtactataacttcagtgaacacacacacacagcatggatagatagatatgctatgtaattttttaaaaaataatatgattccctacggcttttcaaacatcaatggtatcatttatccctccttctttcctttctctcttagttgccccgcctgcatccccagctaagcctccaccccaagtttttcccatttcttctctcacaactgtgtcctactattgccctctttggagcccttctccatggcctgctttttactttcctgatatctgcagttattctgggtgacacactcacatctaaagatcctaagctaggaactgcagatgagggagcctgtggcatttgactttctgggcctgagttacctcactcagtctttgaacatgaaaagagttactttctggggaatcctacccaggattcttcccatttcactggctgacacagttgcctagctcatacagtcacccccagactctgtgatgaagtctgaggactcctaggtacttgcaactcaaaacaattctgaagaaaccagagggctgagttttatagagaatttaaccagaatgcaacatatacatatagaatggtcaatgaagaaaataaacatacatatacattgtgttagaagaacacaatccagaaatcaaaacttagcacaatgcatgactatagtgatcatccttcattcagaatgctgaaaagaatcagaaagaatcagctaggagcttttagttgacaaactaagcatttgtgattttctgtcatagtttataagatttcctggccccaagtagcactctgagctatggtttccagcccgtgagagtagagcatggagaatagctcattctaagtatgtttgcagcaggggatgcttgcttacctctccatcccatatcagagacatggagccttcctcatgggcatctcattttgcccatgcagtcttcctaattattcaaggttacactagtttcccctttgttttgctttgctttgctttgcattcatctgttcattagaaacatgagagtttatattactgtatgaatttcacaagaccgtatttgtgcttcatgacagctgtccattgtagatgaagccatgagaatcaggaagtactgggcacctgagggcacagatggtggtgctggagaagcactgagttatagatgatgaccaggggacccaaagatcctgataaaccaccaagcaggatctttcccagttgtgcgtactggcttgggggcaaccctggtgacttgaagaatgttgtcaccagaggaaaagagccacatcaggtcgtttgctttctttcataattgggtccaaagtagtcaagtaggccattatcaccccagggtgacccttccacagccttggatgcctgccttccctcattagctactatgggattccttatcaaatactttcccccaagtattttaacacaggcagaaatacaaactaacacaacaaaaattataagggcaaaaatgtagatctcaacaacaaaaagattaaggagctttttctttaaagaattttaagctaggcgtggtggtgcacacctttaatcccagcacttgggaggcagaggcaagcagatttctgagttcaaggccagcctggtctacagagttcgttccaggacagccaggactgaaactgtctcaaacaaacaaacatacaaacaaaaaagaaagaattttaatttactcatcaaactatcacattgaagtagtgagttatactcatcatcgttaaccaagaactggttttgtttggcatagtttcctaagtaaatacagacttggtaattataataccctcgcataaatagtccaactcatgcaggttcctcagttccagaatcatgaattcaagaggcagcagggtgtgctagaaagatcacaggctctttggctgacagtgtgggcgtgcacctgcaccaggaaggaaggtagtatgcctttctccttcccagacccctggatgcctcctgcctgtgtggtggatgaataagattgtgcatccaggccctcagatccctgcagcaaatttaggcaatggttaatacatgttagatattaagatttatttataaaggttataacatttgcagctaatgtatcatgcaattttggtagatcttcatattatattttgctttgattttataaagcacagccagagtagaaaatctctataagattgggaatcatgatttgcctgccattttaaatatgtatgtaatggggttgactccagaggctgttttcataatagcacctattttaaattttgatttccagatggaagctatcccaaaagaataccttacattgcctgaacgaaggaaagagctccacaaagaggttgatctagctaggagaaatctggctcaacaggttaatatcagtcacacttttacctcagaatggagaatgaagttgtgtctcagaaatgctccagaaaaccacatcaaaagaagaatacgtagggggcaggaagcagatgcgggggggatggggttgggaaggcagaaagtatcaaataatgatatacgtgtatatggaaatgccatagtggaacccattcatatttataataatatatataagtatatgcattaatatttagagtaaaaatatgatgttagcgtcccgcttataatgggcctggatttttgtttttgttttttttttttttgttcttttatggggaggtttactaagggttggatgcaatgttcaagcatgctagccaaatgctttaggtgagtgtgcatgcaccgccctcacctccaagttcataagaaaaggatgtggcttgagaggacaaagccttcccaggctgtgaggccaggctgtgaggccaggctgtgaggccaggctgtgaggatttctcagataaaaggctgttgatggcattaaaagtcaaccgtgcttcatcaatatctgttctcaaattccaaacttttgtcagtcgagctaccgttgaggtatttttaaaatataattttaaacttctcctagtcttttaaaagcacagcaaggagaaggtcggtggtgctacccctctagttcccacccttcataaagtaaaggaaaacttggagctcggtctcttaataaacacaaaaggacgaggccgtgctctgtgcagaccttgctgggtttcttcagaaagcgaattctaatcctttgcttctcaaaagaaatctctgtcagaagctgaggccaagttagtggagcagcagattgcacaggagaacaaacttctaaaggagcaagaaagtttgcgggagctggtgttcaacctcgggcgaatgactcagatcaaaatagatgagaaagaacaaaaggctaaggatttcctgaaagcccaggtaactaactgccttgtgtggccacccactaattacgacatgggttcaagggaccctcactttaatgcatcactaattagaaagtgatgattccacatttccttcaaattcagtgaccataaattaaattttccctaaaggacactcagtcataccctagaaaaccaaaccaaccaaacaaacaaaagcaaaaaaaaaaaaaaaccaaaagcaaacaannnnnnnnnnnnnnnnnnnnaccataaattaaattttccctaaaggacactcagtcataccctagaaaaccaaccaaaaaaaaaaaaaaaaaaaaaaaaaaaaaaaaaaaaacaaaagcaaacaacaacaaaaacaacaacaaaacaaaacaacccgcaaccttcagttatcaatagttaccagtctagaggttaaaaacaaacaaaaagaatcacaatgataagaactctgaaagatggcaacttcaataagaatggtgtaagtgtctctagtgaccatggctgccaggtgcataggccacagagagaatctgtaagtcacagagccacagatttcactgtgacttgcctctagacaacctgggagcagagcatttacagggtcatcaggtgaaatcatagagatcaatgcaggatgctcttagctactgctgcatcccaggatttcctcagactcctacaaagtgccacgagcaacatcataaagcaagcacatacacacgcacgcgcatgcacacatacacgcacaaatgcgcacacccacagaagtcactaaaattttaaaactagactcagttattccacagaaggattgtgtctagaggttctttgttaaaagtaaatgaaggctgaggtatatttcaatgctagaggcttgcctgtgcaagctttgttctcttgatgcatgtgcgacgggtaatcaagaggcagttgacacagtacgacagccagtgaaagtctagctcaaaagacacagtgagattgtgtttcaaaaaatgataataattaaaaaaatatgatatgagatattactaaagcagaccttatgtacttgtcatgtgacctaggcgtgggccatgtataagtgtgatctttgttcttgctctgagtgcctacaaggggatgggattttctcactccccagaaagagctcacacctacacagcactggtgggcacaaggatgaaatagattctatagcaaagaacagaggagaaatcattagccacacagatccccagctcttctcaccactctcactgtttagacacactcacacctgagaagtgagaatctcagagaacagaggccagatgaagccgagcagtcgagggcagatggtgagggtcacacaacccaccgtagacagtctggtgtctattacaaaagccctgtggagccatggataattgggctcacagaaaatagatgagaaagaccatagtctcccaggacgctcttagctactgcttcatcccaggatctgctctgaagagtggaggagggttgaggggagcagctaagggttgagaaggtcattgccaccaaagtcgggggttggactggggtcagtctagaacactgttttcagaagcaccgactgttggctgggaagagtccacccctgtgagatttcctcgttagaaaacttcccctcttttcttttccgaaaggttagatctaccagaggtgtactttgttattccaaggaaagaactggtctgttttacatttcagtcacgttctaacagctccagcttactgagccttgtgctatctgtgtgtgactagtccacataagctgaatttcattactgaatggactagatcataataaaacataagacagttctcccttttgaagtatggaaatcataaggggaaagtttctctcttgagtacttcattattggcaattactctatgaaacattatttgtagttaactgtatttccacaagaaggcattgaatcttattattttatatcatacttacatctcttttttttaaaaaagatataaggtggctggaattgagattcacgttgttgtcacactcaagaccatgtaggtccaagacagtatagatgacgctttatcttacaccagctttcttctttgcatgtaacctgcaggttagctgtagacccccattttcactgaaagttatacaaaataaaatcactgtgtatccatactgacttgacagaacaaggacaaatgattttgctctgtctgcccctaatggagggtgactgaaaccactctctcccaggagttctgccagcagacactcaatctccaaatgcttcccatccctgagaaagcacccactaggcattttctatctaaagagcatcagtagtacctactagtataaagtgttgaaagtactatatatacctacatatgtatatataagtatgtacatattatacatacatatatatgtgacttttgaaggtataactgttttctttttaatatatttatgtacagttttacagctagtctcagtatgatgcctattataaaggaaaacacacatccaaacaaatggacagaactacactttaaaacactgcctcagtctctcacaaaattccagagggttcaggtcatgatgtttgtcgaacttcctgtaagtcctcttcattgccctctgtaagcacagagctcgactggctgggcagtgcaggctgcagtcactcctcctcagtagtcctcccccaattatcccccctgtctgtgtggactatttcgtcctctccagttcttctgaaatcttaagtatccccttgtcctagttgatgggaatcactccagctggccagggggtgcttaggaatctcctgttctcctcatctctacaacaagttaagaagaactgacagatgggatggagtggggctcagtctcatctcgtggcttttggtggtggtggttttgatagtgtaagatagagtcttactatgtattgcaggctgatcctgaattcatttcaaccctacttccttggtttcccaaatgctggcattacagacatgaaccattacacctagctttctggttgttgttagggttttttgtttgtttgtttgttttatttctcacatgaatttttacatttcagcgaagatatagtgagattgttaaggaaatcaaatcaaaggaccttgaaatcaggctatacaagaagagaaagcatgaaattcataggaggtaaaaagaatttggtaaaaaagaatcacgatttagttatttgggcaaaagtgttacttgctttttaattttcaaaaaccatctcatgttttcagactcagagaatttgccagcttgtatgatacaattagaaatgaaagaaacaaatttgtaaacctacttcacaaagctcatcagaaagtaaatgagataaaagaaagactcaaaatgtcattaaatgagctggaaatcttaaggaacagcgctgtctctcaagaacggtaggagtcataagcacccacgcttgcttaagggatcggatcaggttacctgatgggccggctggaggggccacggcaacactgaggctgtgacaatctgattgagaccaatcagatgttttatacattatcagaaacagaatctagtggcaatttccaggatcgatacaattgtagttgccaggatacaatgacagttgcaaactttagagagtatttaatgctaatgcctaagatcagttgtcctgtcaagcttccctgcttccttgaccttaaaggaacggacggagacacacagaatgtttgtttactgcctgagcgagtgcatggccactcaggaacaggaaggcatgttgtacccccggagctgtggactctaaccagaaaagcctatgacacgtgcctcccaagacagctaggccaggccaagtccacggttctctgaagcttgtgtccttctaaagccttgtcttctatgtctctggcactctagactatcctgggagtcttcagagatggggaaataccttgctgtagagggtggttgggaaaccttgatttaaccggaaatctgtgtttgttgacactgaaggtccttgccatcaattggtttttgatacatcaataaagttgccagtagccaatgactgaggggcaacatagtgaaaattgtgggagtggagtaggatgcagggagaactggggacaggggtagggggtggagggcagggcagactaggaagagaagaaggggataacagcaggaaaaaaaggccaaccatgggagttttaaggtaagtggccacttccctggttgggcctgggaagatttaggagtgaccagtcattgaattagccaaggtgctcaagcgtgtgtgcttgtgtgtgtgtatgtgtgtgtgtgtgtgtgttttctattcgctatctcagatcgtgtgcacccggccaggagcacaaagtcatgtagacaaaactacctgctccaccttgcttctcaggtaacaacctaggtgtctgagcatccttgctgttctccatctagtagtcacagtttttaatgaatgcaaaacttaatataaaactatttttcctaatgatgaactgctgactttcattgctcgattgagaaatgaagcataaatctgctatctgcatttgaagttaggagacaaatcacttcttggatagcatcccccggttgtaggtttaaggcatgtgatgtgcatatggagaggcaggctacagcagatctgctaagacaacgctttctagactcaactcacagctctgtccgtctctgtctgtaagaccttgggcgagatactctacctctcaggaccctttctttataatcctcctcattagtgtgtagaaccttttgttactacacaataatgacaaatgagtttgtctatgtaataacatcagaaataacacctgagaaattgtagtcttggaaatatattgtttaccacatgccaagatccactggaatcttccacctacttggttcctgatttcctgagcctacataactggatttttctgttagccatcattgcccagatgacttagataaagataatatcaaataccctgattaaaaagcacgattgaaaagggaaatttcctagtcagattcttacccaaaaggaaattagaataccgtatgatatcatccaacctgacccatgtgagtctgcagatccaataggcattgtcaatagaagcacctctgtcctcagaactcggtctcctgaggtgacagagcagaaaaagaccttttcacaaacaagtgtgacacagtggttgacacaatgacagtattggtcacctggctagaggaaggatcccacaacagagaaagtgtgtcctgggaggtcctgggtgagcattgctcttcagacatctcagtattcttgaagagagtaatgatcttccccactgtgccattattttaaaagaaagctacaaaacgccatgctaaagcattccaacaatgtgaccatcaaggagagcatacagaacgatgtgtgcaaaatcactgctaaactccaggaaatgaaggagaagaaggaggcccagctgaccagcatggacaggctggccagcatgatcaccgtgatcgaagaggagatggtgcagctgcgcaagaagtatgagaaggccgtacagcggcggaatgaaaggtaagggtcgcaaatgtggctgggctgagtgcccgggaccctactgagaggtagccatgttctttacccttcggggggagccatgggtttcccatgaagacaagacaggctgcctgtggaagggaaataacagggaggttggggcagttgaagaacaaagtcatctctgaagtgctaggagagtggttctcaaccttcttaatgctgtggcccgtttatacagctcctcaggtgtgctgactccccagccacaaaattattccgctgctacttcataattgtaattttgctactgttatggatcataatgtaaatatctgatctgtgacccgatgggggtcccgtcccacaggctgacaacctgtactctaggctcacactgaattccttctgcatcagctgctgtgagtcactctctgtaacctcgctccatctgagcaggacttggctttatcaacctattctcatagttcattttccccacgattaactaaggcatagaggactgacatatttcttctaagctgcaagcagccacaaacaggatattactctttaataccctctccccgccccccaccaactcagttgcttgtattctgagaaattggtaggtgagatgagggaatgctgaaatgattcaaatttcgtcaagtgtgctgtttcacgtaaagtgctggaacactgggtcccgagggaccagatgaagcattggtgctgctcttgttagcaagggactctgataagaagaagcttcgatagaataaagcataaagaaagaaggtgaagagagcactgaggttagccagggacaatgtgcaccattggagggaagagagagagagagtcagaaaaattaaaggtagcagttacagcaatgtatgtacaggtggtgtggggagatctctaagaacttaagttcttcaaacagaactcgttcaaaggactgctgagtgttccttctggtttaaaatgcaaaaacaaatcctagctggctcctggcacaagcagaagtttgcaggcaaatagagtgttcgaggcccgggtcagaccagaggcactggaggaacaaaacctcactttgtttctatcctgtggcttcctctcaaggagggacctttccactgtgcctgtcagcatggtgacagagggcaggttacagggcaacaagcatcagaaatgtcacttttcagagacccctatgcctggcgactctctccagagtcgcattcctagactcctgcccagcagcttctgcccttgcctggcaagtctgacccaagaaaagatctgcagattgggcttgtgttttgctttgttcacatgttgggagtgacctcccctaccccaggggaacctttagggtttaccaaggccactgtggccagcctgctgcacagctagccttagattagagatgccaaccctgcttgtccctatggaagacccagtgtttggaccttaatagaccaagctattagaatgtatcactatcccctgaaattctgttctgtatgctatgagcccaaagccagagggaaccacagagactaagaaatagtggcctcaacaacccacttagactcctgctctgaatttgaccacagtggtgttcagctgatcgagcgggaagaagaagtgtgcattttttacgaaaaagtgaatgtccaagagaagataaaacttcatcaggatgttgaaatccacattctggaagaaaaaatccgattcctaaaactgaggattgccgaaaagcaaaggcagatttctgtgacacggaaactagtgccaatcaagaagtccctggatgccgacctggctgtgatccagattcaggtgggtgagcggccaggggacacttcctcaggccgttggcttggctcctggccccttggagtttatagtggaaatggtttcttgaatgggagccaagctgcactgctggtgataacttccttgttattgtgtttgaagatggatttgaatattgctccaggatggggttttgagaatctaagcttctctctccccctcnnnnnnnnnnnnnnnnnnnnnnnnnnnnnnnnnnnnnnnnnnnnnnnnnnnnnnnnnnnnnnnnnnnnnnnnnnnnnnnnnnnnnnnnnnnnnnnnnnnnnnnnnnnnnnnnnnnnnnnnnnnnnnnnnnnnnnnnnnnnnnnnnnnnnnnnnnnnnnnnnnnnnnnnnnnnnnnnnnnnnnnatgctataccaaaagtcccccatatccacccacccccactcccctgcccacccactccccctttttggccctggtattcccctgtactggggcatataaagtttgcaagtccaatgggcctctctttccagtgatggccgactaggccatcttttgatatatatgcagctagagtcaagagctccggggtactggttagctcataatgttgttccacctatagggttgcagatccctttagctccttggctactttctctagctcctccattgggagccctatgatccatccattagctgactgtgagcatccacttctgtgtttgctgggccccggcatagtctcacaagagacagctacatctgcgtcctttcaataaaatcttgctagtgtatgcaatggtgttagcctttcacttctatacttctataggctctcactgcctgtggcacaatcctgtcactggtatctctggttccaccgagatgtagcatttaggctttctggcttgttgaagcagggtcttgcaccctgtatagcccaggctaatttcaggctcattgcagccttcctgtctcagcctgctgagagctgaggtgacagactgtgctaccacacccagcctgacggtcagtgcttacaccctctgaagaaatggcaggctcttgagtacgcagtcacacacagcaggacctttatttacctctgtggttcccaatagcagagactgaaatgtgaatatgtctactttgttcacatgtaatggtatttttatgaaagcataaaaatcaatggaaccaattatttgttacccacacttttccctcacggactcaagactgcagcaacagtcatcctggtttgggtggattttttttcctagttataaaattaacttcattctttaatatattcattgaagaaacttggtcaaacatatcaaattatatacattagtatatacaacagtggagaaattggaaactcagcagacatatgtaaaagagttgttgatattttatatgagaaatgatactatgactaaattttcccttaaaactcttatgttttaaattgggtgtggtatgcaggcttgtaatcccagcatttgagaagatgaaacaggacgattcctgtgactttgtggtcagcctaggctacacaataagaacctctataagaaaaaaaaaatacaaagaaaaataaaacggacttcttctgactcatccagatgaacccgtgtggtggtggtgggggggataactctgacctcatcctgcaggtgcctgggggtagagcagaggcatggcccgactgacaacagccgtgttggcagctgccggagccgggagccgagagccgggagccaggcgtgtggaagctcacgctattctctcttttggacatttacataattcacaagatttaataatgagaagttaatcattcttagaaatgatcagctacccactgtgaagtatgaattcagttctatccaagagggagctgttatgtatttaatgatagtctctgccacgtgtgacggcgagcctttatcacattggctgtgtgtaacctgagacctgtgggctgtgcgtgagcttagggttgatatgcggaaagccacctgttcactttcacactgcacccgacatgtgattgtatccacactgactgtgctcctaggaagacaggatgcgaagtgccaagctctgggcaagccacacctacactctgccctccaagaccgagttcttgacgcttcctgctgtataagagttagttgttttgccgtgtcttaagtcttcctctattttgcatcattttcagaattctattaagactacatttttttttttttggtcttggttattttgaaacaatttttaattgttcacaggggttgccatgagtcatgttctgctgaaccttgtagtaataattccattttaggagtcctggaaatctcatgagcaattgtaagacacaagaacattgcttttataaggaaagtgaaaaatatttccctaagtgcccagggggaaatttaaataaaggcactagatttatttttaaaggtttctttatttttattttatatgtatgagtattttggctgcatgtatgtatgtctgtaagtgcacacaatatgcttggctggtgcctgaagagatcagaaagaagtcatgattttctgaactggagttacagatgggtgctgggaggtccttggcaagagcaacaggaggtgctcttaattaactactgaaccatctgcccagccctgtggaggttctgataagaaagtatcatttatttcctagtttcttaattaagaaaactatgtaaacattaagaggcattactgataatttctgtcactattttaaatgttactacttaaaattcttattatagagaagagggctaccagttagaattgtaaagctctatctgtagctcgcctgctgtggtctaaagcgtgaaagcagtggttctcagcctccctaatgctgcgaccctttgttgctacttcacaactgtaattttgatcctgaacagtgtctcagtgtctaagaccatcagaactatgtgttttccaatggtcgtgacccacaggttgagaaccgctgtcctaaactatatcattcatcccatgggatcaagcctcatcttgccatgtgccaaatgagaagccaaatgtttctaaaaaactcttacacaatggagggaggctgagaacaaggcctttgggtgatcatccccccccccccacacacacacacactctttaaactaagcatggctattattacggtcactacccgatatccacatctcagcaattcaacagggatgatctagtcaaaggctctttagcaaaaagcatacacgtggctaagactgttgctcacacagtgcatgctgagttaactgataatttcctttttggggaatcactgaggccactgccagagaggaatccagcttgttacatgccagctgccccacctctgaaacacctgcagcaaggcagcaaagaccattttgaatccttaaccacacatcatcccatgaatgtcacacacaattggaagcaatggaagggcttgtaggaacccagcctcctcccatgtagaggttattgaaattttaccaagcttgagagttaaactgaaagctaatgtttgcttcttttgcaccagttttcacagtgcacagacaggataaaagacctggagaaactctttgtgaaccctgacagcaagggcagggtccgcttcattaaagggaaagatctgactgaagaagaaatgatcaagaaattagatatggtaagagttcttaaacacccaactgcttgctcacaggtattgcaaacccatcatcccactagacctcccctacttgtcatggagtcctaaatcctaactttgatagatatttacctaaggaaggaaaggtcctgtagtttcaggattcagaagtgcccttcattcctagcccaaaagaaattttgacttcttgaataaatatgttcatttgtcatcctggtgggaacatctgggaagaatggcattgtgggtaccaaatagaggcagaggtccatagcccaccctgggaggagagcccctccctagcccgagtgtcccctgacatagttagtacagctccagagacttttcagaggtattttaacaacaaagaaagcaatgtgtctctgtcgtggggtagaggactaatggaggatgaagaccatgccttacataagtcatttttttaactcctactgaaattgtttccaactgtagctggaacttcagatagccaagaaggaggagaagctcctggagaaggatttcatctatgagcaggtgtcccagctcacaaacaggctcaaaggcaaaactcaggcttgcaagaaggacacactgctcttagccaagaaggtttgcctcaatgacagaacctcccctctccatgagtgatggaacccccctctttccctgagtgatggaaccctccttcttaagtaacagaaccccctctctccttgagtgacagaaccccctccctgagtgatggaacccccatccctgagtggtggaaccccctctctccctgagtgacagaaccccatccttgagtggtggaaccacccctccttgagggacagaacccccatactctcatcctgagtgatggaacccccactctctccttgagtgacagaactccctccctgccccaactcctgctgtccccttccatgctttgctcttaattgctgggaagcactgagagacagaggtttaggagcctagaaacaaatggagcttcagtccactcactccccaagtgaatccacttcacaggaaggaagcacaagctttccaaggagagtattttatttcacagggcaacttctcaaatatactaatccttagctttgtagtttgtgtacaaagtaaaaccctttctgttttttgagcagaaaacatcatttatccagcagtctgagtaggaattgctccaagacagtatccagccaaaacccacagagggacaggggcaattgaagagatacagcagtcacacaattcccaggctggcccttccaagtgacatcagggctgcagatgtgacacagctaggttggcacccactaagagcaatgctagtgggagaggctggtgactaagggtggcaggaccccaccgtgcctggtgggggaaggatggaacactcaccagcttctgtgacttttgggcatcctccattgagaacttttaaccacccagcgatagccatgtctgtctcgccatacaggaggcagacacggtgtaggggggggggggtgcgggggggagtatcacacactgtctagcagggtaagaaagaagaaactagctgaaggtgactgagtgtacacccacacctctctgactgcccctgccccacctgctgagggtgaaggattcctacaccccagacccggctccagagggtaggggcacttcctctttcagtttctcaaggcctcacatgtaatagactctagacaactgtgcatacatcagccaatagtcaatcgtgttctgcaaatagttttatgaagctgtgtgagaaataactgaaaagtcacctagaaagcagtgaaaacaccgttgtcacgtggcctgtccccttctgttctgctgagcccaatgtcagtagtgtacaatggggcctcataaacagagaaatgatgagatttactgaagccagtgagctttgtcagaatcagcacccttccctaagtgtctgtaaatgtctcttcccttccctttgcaaaatgaattccctgtcttaaaagtcgctttttcattaagagatgatttttcaaagctgatggcagagcctctagaaattatttgtgagactagagaaacacagtgtggccaggaaggccccaaacagctgaaaaggctcaaactgataaacccatgttattgtttgagccagaacttaggcatgaagagcatctccctaccctcctttactcttaaaaacaaacactaagccagtctccatgttctccaacctagaagctagtaattagagatatctttcttttagtttcttgtttggttttagttctcgtatttacaaaaccaaacatgttgagttctgtcctggttagttttcacaatgtgacacaacctacaggcagttggaaagaagagtgtccacttcgaagatcacagtggccttggccattgtcaatgaaggtgtgtcttgggcaatgattgatgttgggggaccagccctctgtggccagtgccatccctagacaattaggtctaggctataacaaaactagcttagcatggcccagcaagtgagccagggaataatctaacaagcagtgtgacttaccctgtggcttttgcctgccctgatttccctcagtaatggaagtacctgacaaaggccctttcctccacacgtttcttttgctcattgaagagtaagtaggagaggttccatccctggagcctcttgcagggattttctgtggattcccattaacctctcatcccttcaggaaaggctgcccacacgggtagccagcagtcttgttttccccacatcctcatgggatagctataccaactaaaccgtgggctcctcgtttctagatgaatagctaccaacaaaagatcaaagttgttacccaggaaatgatggctcttgttgctgagctgtccatgaaacaagccctgaccattgaactccaaaaggaggtgagagagaaagaagaattcatcttctcctgcagtgccaggatagaaaagggcctcccgctcaacagagagattgagaaggactggctgaaggtgcttcgagatgaagaaatgtatgcctttgcgactgctgagatgtctcgggtaagctttgtgtcctgtgctgcaaagtgtggcagtgtcccctcatgacacagtgggccccttatctgaggcctaggaatagaaatggtttgaactttctatgattttcatgagatatttgaggagtggagcccaagtctaaacaccagactcacttgtttcatatgcacctcatatacacaggatgaaggtgacgtcaatgcatatttatgcctatttaattttgactgtaatcatgataggacaccatatatggaattatctatttgtgacatcatatctatcctcaaaaagtttggagcattttgggtctcagggttttggattaggctttcttcaacctgtataagaaagtttcccactctaacaggcatagtctgaatggctggtagaaaggggtttggcatgtagaaaagactttggactagtagtccaaagcaccacctttctccctgaggagcagctgagaaccatcatcccagtcataccctgaactggcatggttgaacactatagcctcccccggcgtgcctctgacaattctaacattggcatttgctcgcaccacaactgacccttctatgtccttctgtcatggcctccacagccatattacaactactacagccttctacagaaccatacctggcacatatcatagagctctatgctacacctttctcctccccagtgaccaaggtcttggtcggtcactgaagccaccagcgagtctggtttcctactcatctgtctaaccccatgatccctcgatagtttaatattataaggcatctcattccaagaagcccacaggggttgcagaacaggcaacagaggtgggggtgggcttcaccctcctctacttgttcagcaaggcctaaagatgctcttttaggacccaggaaaagttaggttcagtgctttagaaaactgaaatgagaacatcttcctttgcaggagtacatggaaacggattatcggcagctgcccaatggtgtttatacaactgcagagcagcgtccaaacgcctacatgcctgaagcagataccgagcttcctctgcccaaaccgtatggcgcgatggctccatttaagccctctgaacccggagccaacaggaggcacattaggaaacctgttgtaaagcccattgaaatctaaacatgtgaaccaacccagcagtcctctcacagagagggcctgagccaagcctcagaccttctatggagaatgagcaccagggttctagggctgctgatgagccaggcacggtcaacaacaatgggttgtttccaaagcagtggcttccttgtacattcaccaactattacctggtaagtgacactgaatgggacatagactacagctgtgtcaaagggcattttgattgttcatgtgtttctttttcactgcttatagttactacacctcaggaatgtacagtagacaagatgctgtaaaagtacaaaataaataacttttcagtgaagtacagacattagagtgttttctttctattagaggaaaaacaggcacccatttatgtgtgcacagtctgactacctgattgaggaaactgctatgtgacagatgcagcccctctgctgcagcagcatgaaggctgtgtgaagagtggtggggacacttgtcactcaagcgatgttacttctgtgagaacaattctacttatctgctcagagattcatttcacccatatgtttttctgatcccagtgtctttattattagatgggatgatttgctcgtatgtgtgaggcccatccttttacatttacatgcttaagctgtttctcctgtgttggtggtagttataaatcccatgtccagctctggcacactgagacatactatacttccattttgctaaatccaacgtgatgttccaagcacctgttctgacacattgggtggggacttaagttgactctcattttctgagtcctgaatttgacctctttgctttgcactacattccaaagcaaaggacatgtgagacccttgagtaagtaccagccctttagctaagaaaggagtcactgcacactgaaacagtccctatggcacaggaattaggaacctctttgggcattaaaaactatatgcagagaaagtttaaacaccataagaatggtaagattttttttttttaatcacagagagactcttaaatattgcaatgcatgctgctagttgataaaaggcaggtgccaccatggactgaagtatcttagattacagtccattgtgtgtgtgtgtgtgcgcgcgcgcgtgtgtgtgtgtgtgtgtgtgtgtgtgtgtgtgtgtgtgtttgtctagccctagaacatgaagatttggggggtttgaggtagaaagggactccaagtggaggaaacaaactgttccaacctttgaaagaaggaggccaaactcatgtcccaaggcctagtgaaccagcttggctgcaagagcgttcatattgtacaaggtcaaaatttgagagtgaagtgccaagggagttacacgctactcttcagtaaacagcaagttagtgaagaattatgagctagtgtcaaagtcacactaaagattacttcatatctgtgtccaataaacccagctttacgaattcacaggaacaatgcaggcgtgaacagaaactactcgaaggatgtaggcaagtgtactgaaaacagcagaaggaagatgaaccatttaaaatacaaattaagtgtactgtcagagttttattagcaaaaaaggatttttaaaaatttaatttgaactaaataaaacctgctgtctccagtacagagtaatttgtaacacaagcaatatgaacagacagaaaaaaaaaaaaaagtgaaaataccgtattgcagcattgctgacttggtggcaaggttccgagcctggctgactatttggagcaaaagggaaattctataggctaggacagtttctagagcacagcaaagattgctgaaaatacggtggatttcatgtgagttagtgacatgtagaatcattaaaatctcgccatgtgaacaggaacccatgaggacagagaagcagaacggaacctggaaagccgagccttaggggtcagcatgatgtcactgcaggagggagatgagaaaggaccgaacgaacacctcatcaggtgtcaggggcctctgcctagtcacactgacgggctcaagatgccttatgcaaataaggctatacccaaaacttagggagagtcagaccaaaggtttcagtatttgaggtggtatttaatgacaagatagtactaaatcataaatataaaattaaatatggctctatctgagccaccacaaaggcaaaggctggtctaagccctgtatggacaaatggttatttgtccagttcctccaaactggacgtgacaggctttgcttcctcagtttcaggttctcctgagatgctcttcccagcactgacctttcctgcctgtcctatgtcctttccagtgaccgcctggctctcactgttctaggcattgtcccctgtgtttgtattagattctttagtgcaacagaaccagctccaggcctactgggccaccaaggagggcactgttcctgccgcagcacacggccttgaacttgttctttcctcttggctgtttactggctgcttgaactgagagaaggagcagctgcctcggaataagaactgtaccgaagccaacagctctgcagtatattctgacctgttcccaatcttaaagacagtgggaaagtttccagaaaagggaggtgaaaatattgaaatcgtccgtctgcacgtccactttcataagcccaaaagcatggtggtgtgtttcagagcagcttcctctacaaattctgcgtccacattgtcatgtccttcaaagccatacagtgctgggaatgggtgaggggagagagagagagagagagagagagagagagagagagagagagagagagagagagagagaggagagagagagaagagagagagaggaagtgttaatatggagtcatggctatttataacgttcccacagcttactgagaacatcattttatattttagtgaaatgtgttattctgagaatatgttggtaaatatcattaagctttggtttaaacacctcaaggccctttcagtgttcaaaggtaagtccccctttggtaattaggcagtacatactctctctaacgaaatcaactttaataaggacgtacttgtaggaggtacaaggaagaaaacaatacaaagtgtgaatagggaatgattagggtgtcaaggcaaacgcctggacacagaggtatgagttaccttggttggaggactccaggcccatcagaatttcgatgaagtagttcagaggcagaaattctaccggaaatgatgatttgtcaatcatggagttccgaggctaaaagggaaaacactccctacatatgaattgcttctccaagaaacgcccaactttaaataaaataataaaaaccataactgtctacctgggcttattgacatggcgggtgggctctgaagagtgctttctatctgggcttactcggactcacctctttcctgtagtttttcagcagccgggccacatggttccgtgaaatgatattggaactcatggggtggtcccaaagccggcagaccttctggccaataagctaagtgaggttgaaagacacacagaggagagtataggtcacagtgcatcgacagaccacatacctactcttaacttcaaactgtgattcccaagtggctagctattgtaaaatgcagaatatttgtgatttttgacccttggagagaggccatgttcatgaaatatgcttctgaagtgttcataaatactccctcaagtgctaccatgaagaaaacaacttttacatcaatgctgccaaattcctttctccctgagatccttcaaagctgaagatgagcataccaacccagataacactttgactggaaactaaagatggtatgtgtgtttgtgatttctcttctgtctggtccagaaactttaaataccccaacatacaggacaaaagaatagtcaaatttgtagaccaaactaaatgtcaactcttttcctaggggagacagcctgggaaaggtgggtgctttgtactcaggaagcctgtgactgaaccactataaggcaagaccaccaggtccagaagggacatccttttggggaggatggccagggccaaaggtcccggtgctcacagatgtaaacagtgtgcagggctggccaggctcttgggtcaggaagtttgcaaagtccgaggtttggaagaccttgctgtggaatttcacgttttcatgatgtttccaactccaagagctaatattcccacaaaagagcaaggagtggcttataaccttttctcttgtggtttttgttcttcttttgacctggaaatgttttcctatgctcagctatgcaataagaagaggaaatacagttctagaaccttctggcctcacttgtatctaaatcccttatcagtttaaatgccagaggcacacgtttcccttttccctccaactcagactctgatataaacaggagtgtgctttcctagggaatgagatgcataaactatcagcatacactgtgctagagctcagcgccagagaggacacggggtaggccctgtgagggacagccaacagaaggctggagatggatgggaagtgaactgacttcagccaaagggaggaaactcttctcacaggcgataaatgaagaagagtggaccagggcttaagaggaaatgaatttcaggattaccggagggagccggacaatgatgctgaatttcagttgttcatttttctctgaattgtccagatctacaaaaaaaaaaaaatttggagattaacagataagacagatatatccacttaaataccacagccagattcaatcctgagtgttcccttctgaggcattccaaccctgcatctgcaggctagcaatgctttgaaagctttagttggtgacatggactcaagggggctttttattttgtaacaggctgctggtcacaagcaattttatcccccaacttaaagcataaagacctctgaagaaggacggctgctatgttaggtaacgttgacagaaggtgcgcatgaatgacttacatgagagagattatggccttaacagtcatgttcacttgcacactgttatctgtcagttttacttgcatttccagtcgaactttgaaatgacaaaattaactggctgaaagtaagccaatcgtaatatttgcttgaaaaacaaattcacggacacagactctcagcctcttcttaccctcgaatacagaaatcaaatctaatatcagtgtctagactcagatgttcttcagggactcctgaagggctaaagtactttcaactggcctgaaggaatggttccaggacatgggctgtactaagaatttgtaaggctcggtacagggtaaaataaagtgatatatgttcaaatagtaagagcttcaatatgtactgcagggcattcgactgagcattggagctttctgaaggtagctgggcctgtgtgtcacatacccagaagccagccctgagggtggccaggctgagactcaccctctgcttaactcagatttgcttacctttcataagcctcgtgaccgcggtctcagtaagcagcagcactccgttatcaatgtagtgcagaaggctgtacaaagggaggcagtggaccccaaggatcgtgtgcagagagtggaaacctaggtgagtggaacagaagcagacatgacgagccgagccagcatctccagcttccagagaggatggattgatcctgtcagtaaagcaagcgctgagcttgcttagggcttgggtcagccaatccttttatgacaagaagttcctggttaatataatctctctgtccttgataactgatcttcaaattccacacgcccaagctaaaaggctgttgggatggagaccattttgctgaaagataaaaggaagctggggccagatgacaagttatatctctgtctctggtcctctcacaaagacttttgcagtctacttggactaaactatagaaaagaaatgtagatgatatgacccgatcagagccctgtaaaaattcagtagagatgattctctctctccctccctctctctcaagtctaatgagtagggctacaaacccagagctctatgcatactatcagtgacaaggaacaaaagaaagacatatggaaggagataccagaccagatgagaataagaaaacccattcttggagtgtcagcctcttgagcatctttggaaaggtctatacttagtgtgcagaaacatcagaggcagaagagtagatccaggccaggatcctgctgctgtttaactaagcagctctaaataactgcctttctgaacttccttccttaccgcctaaagtggaatgcggataccttccttctaggctattacaaggaatagagcagttatacagagcccagcatatggtacagtgtgactaacactgggcacgcactacgtgagcactggttcacctgctccatacccaagactatcagatgcaactactagattcccatagattcaggcagggaaactgagattcccaggagctgagaaaacttccctgtatcctataaatagtaagcaaaaggttagagtagcctgaccatagcctggggattgtagccttagttcaatatcttagagcaatatctagtagctgggttactgtaacaataactgggttaatatgaacagagacctaaggtgagagagcatgcatgggtatattcagaaacatgaagtgatcatttgagttgaaatctgatgactaacaggtaagtctgggcaacatttacttaacacattctcatacatgaagccggggtgggcagtaggacaatggacaaaatactgaccattaccactcctgttcaccttgccatgtagtagaggtgccaattgattcatcataaaaatgaacatatatttacatgtgaccagttctgtgctatatgtacatataacatggacccaatgctgaatgctactaaagaatttatccaggaaacctcaaggaagcactgaaagtttttgagcatcataaaagaacaaattttacttttggaatattacaatgccaacagacaaagaatggattagacccataagaactgtggtctggacaggtataagagggactgggggcaccaagtggggaagaagagagaaggacgtgttctagttagggtttcttatttatctgacaaaaacccacagctaaagcaatgtggggaggaaagtgtttattctcctaacagttccatgtcactgtttaacatcagaggaacagggacaggaacccaaacagggcaggaacctagagtcaggagctgatgcagaggctatggagggtgctgcttactggcttgatcctcatttgttgctcaacttgcttttttatagaacccaagaccaccagcccagggatggcaccacccaaaataggctggacccacacacacatgtatcactaactttaaaaaaatgccacattctaaggaggaatgaagtatcctcacttgttcttccttcttcttgagtttcatgtgttttgcaaattgtatcttgggtattctaagtttctaggctaatacccacttatcagtgagtgcatatcatgtgagttctttttgtgattgggttacctcactcaggatgatgtcctccagatccattcatttgcctaagaatttcataaattcattgtttttaatagctgagtagtactccattgtgtaaatgtaccacatattttctgtatccattcctctattgagggacatctgggttctttccagcttctggctattataaataaggctgctatgaacatagtagagcatgggtccttattaccggttggaacatcttctggatatatgcccaggagaggtattgcgggatcctccagtagtactatgtccaattttctgaggaaccaccagactgatttctagagtggttgtacaagctagcaatcccaccaacaatggaggagtgttcctgtttctccacatcctcgccagcatctgctgtcacctgaatttttgatcttagccattctgactggtgtgaggtggaatgtcagggttgttttgatttgcatttccctgatgattaaggatgttgaacattttttcaggtgcttctcagccattcggtattccttagttgagaattctttgtttagctctgtgccccagttttttcatgggtttatttgattttctggagtctatcttcttgagttctttgtatatattggatattagtcccatatctgatttaggattggtaaagatccttttccaatctgttggtggcctttttgtcttattgacggtgtcttttgccttacagaagctttgcaattttatgaggtcccatttgtcaattcttgatcttatagcacaagccattgctattctgttcaggaattttccccctgtgctcatatcttcaaggatttcctcactttctcctctataagtttcagtgtctctggttttatgtggaattccttgatccacttagacttgagatttgtacagggagataagaatggatcaattctcattcttctgcatgataaccgccaggtaagccagcaccatttgttgaaaatgctgtcctttttccattggatggtagagacaaagtttggagctgagatggaaggaaggaccatccagagactgccccacccatatggggatccaaccataatcagccaccaaacgcagacactattgcatatgtcagcaaaattttgctgacacaaccctgatatagctgtctcttgtgaggctatgccagtgcctggcaaatacagaagtggatgctcacagtcagctattggatggaacacagggcccccaatggaggagctagagaatgtacccaaggacctgaaggggtctgtaaccctatagaaggaacagcaatatgaactaaccagtacccccagagctcgtgtctctagctgcatatgtagcagaagatggcctagtcggccatcattgggaggagaggcccttggtcttgcaaagattatattccccagtacaggcgaacaccagggccaggaagcgggagtgggtgggttggggagcagagtgaggggagggtataggggactttcaggatagcatttgaaatgtaaatgaagaaaatatctaataaaaaattgtttaaaaaaataccctacatgcttgcccatgccctagtctaagggaagcaattttttagctgaggttccctcctctcagatgactccagcttatgtcaagttgacataaaaccagccaggacaggaaaagtctcatgataacatgtacatgctcaacaactgactggatgcaggaatgacagagaatcacagcctgtcctcaggatgtacacggtcaaacaaattatgctcagtgaactgtagtttgagttctgagaagtcacggcactttctctctgaatatatgagtcatgagcactgggtcactcataattcctggcaacaccaaggatcacatgacgtgcagatgttgtcctcaagttgatgtaaatggctaaaaacagattgagttcactgggttccccaattcaaaacaaattatagtattactacctaatcaacacagtttcacatggacttggaaattctttcccagactaataaagtcaaaacttattcctgaaaaagcatttatactagatcacgagtcgtattcccaggttcaaaattccttctccagtgtcgggtacctggtgacaccccaacaatccttcatgtgtgcgtcattggcacagtatcaagggcagtagcctatttacagcctcatctctgtgtgtcagctctgagcagagtgggtggctataactagccatcggtttcatcgcactaatcgtcgtcctcagagatatcgcccttgctgaagccagggagagagagatgacagcaaacaagcaagcaaacaaaaccaaacaaacataaaaacaatcatacaaacaaacaaacgactctgctcgccacttcctcactccctttttttacttacatgtctgacttatgaaactcaatttttgctagtcccatagatctgaaaagcaatctcccttataaatgcttagtatgaaccccttgtaaacacacacacacacacacacacacacacacacacacacaccagtggtgccactttgccctctcttctcttgtcacatgaacaattataagcatttgatagaaaaggaaaagcctggtatggtacggaaacaccctcgtgtaatgccagaacttggataatcagaagttcaaggccagtgttggctacgaaagtttgatgccatcctgag

SEQ ID NO: 943 - DNA, 3384 bp, Mus musculus
ggataccaaggacgcgactcttaggagagggtgaagttttgaagtgagaccccagggaccaaaacacacggagaaaaataagagtttaaacaaggatcaggaccaaaagaaaggaactgtgaaaaatggaatacaatagcaaagatgcagaagaagaaactgaagatgaagaggagggactgaaggaggcggagggggaggaacaggagaaggaggaggtaacagcaacctcagaaacagacgatgaccaagaagacctcccttctgtcttagtgcctacagttaacattcgggaggagcggctcatcaatttagctgaaacaccagctttcctctgtctgcatgagctgcactccaagggaaaacttcctggaaccagaatggcagagttgaaagccaagtacaccttgctacacgatacagtggtgagcacgcaggagtctgaggtgcagctactggagaacgccaagcgcttcacggagcagatccagcagcagcaggtctgtctgcagcaggccgaagacttccccaacgtcttcaccactgaggtctgcaaacttcgggagcagctgctcaagtaccaaaatgaatacacggcagcgcaagaaagggagtacaatattcagtacaggctgactagcttaacagaagaaaagagtatcatattaaaggaatttgagaagatacctaagccaggagaaatagagaagaagacgaggctcctgaaagaaagcactgaggaactgcgcaaggaggtgattcagaggagactggagatcaaaaacctgcgggaagatgtggtgctcaagcagaagcagctagtgagggagcagaaggagctggaggagctgatggagtatcaggttggcttgaaggatgacgtggtccaccatcaaagtgttcctgtacaaattacaaaggagatagaaaaaatgacacgcaaaaaagtagaaacagagaagaaaaatattgtcttggaatctgagttgaaagagctaagtgactctttaaagaagcttgaaaacaaagtcaacactcttgcggaagaaagggatgacataatgaaggaagttgagggcaagcgaaccttactagaagtcaaagaacgagagtatggccaactgcttaaactattggaactaaccaaagagaacgaagcctcctcgctagctgaaagagggatcttggatatcaatctacggaactgtctcatcgacaagcagaactaccatgatgaactttctcgtaagcaaagagagaaagaacgagattttcggaatctgaagaagacagagctgctcctgaaagtgtctttggatgcgctcactcaggcacaagccatgaatcaaaggcttctactagagatggaagctatcccaaaagaataccttacattgcctgaacgaaggaaagagctccacaaagaggttgatctagctaggagaaatctggctcaacagaaatctctgtcagaagctgaggccaagttagtggagcagcagattgcacaggagaacaaacttctaaaggagcaagaaagtttgcgggagctggtgttcaacctcgggcgaatgactcagatcaaaatagatgagaaagaacaaaaggctaaggatttcctgaaagcccagcgaagatatagtgagattgttaaggaaatcaaatcaaaggaccttgaaatcaggctatacaagaagagaaagcatgaaattcataggagactcagagaatttgccagcttgtatgatacaattagaaatgaaagaaacaaatttgtaaacctacttcacaaagctcatcagaaagtaaatgagataaaagaaagactcaaaatgtcattaaatgagctggaaatcttaaggaacagcgctgtctctcaagaacgaaagctacaaaacgccatgctaaagcattccaacaatgtgaccatcaaggagagcatacagaacgatgtgtgcaaaatcactgctaaactccaggaaatgaaggagaagaaggaggcccagctgaccagcatggacaggctggccagcatgatcaccgtgatcgaagaggagatggtgcagctgcgcaagaagtatgagaaggccgtacagcggcggaatgaaagtggtgttcagctgatcgagcgggaagaagaagtgtgcattttttacgaaaaagtgaatgtccaagagaagataaaacttcatcaggatgttgaaatccacattctggaagaaaaaatccgattcctaaaactgaggattgccgaaaagcaaaggcagatttctgtgacacggaaactagtgccaatcaagaagtccctggatgccgacctggctgtgatccagattcagttttcacagtgcacagacaggataaaagacctggagaaactctttgtgaaccctgacagcaagggcagggtccgcttcattaaagggaaagatctgactgaagaagaaatgatcaagaaattagatatgctggaacttcagatagccaagaaggaggagaagctcctggagaaggatttcatctatgagcaggtgtcccagctcacaaacaggctcaaaggcaaaactcaggcttgcaagaaggacacactgctcttagccaagaagatgaatagctaccaacaaaagatcaaagttgttacccaggaaatgatggctcttgttgctgagctgtccatgaaacaagccctgaccattgaactccaaaaggaggtgagagagaaagaagaattcatcttctcctgcagtgccaggatagaaaagggcctcccgctcaacagagagattgagaaggactggctgaaggtgcttcgagatgaagaaatgtatgcctttgcgactgctgagatgtctcgggagtacatggaaacggattatcggcagctgcccaatggtgtttatacaactgcagagcagcgtccaaacgcctacatgcctgaagcagataccgagcttcctctgcccaaaccgtatggcgcgatggctccatttaagccctctgaacccggagccaacaggaggcacattaggaaacctgttgtaaagcccattgaaatctaaacatgtgaaccaacccagcagtcctctcacagagagggcctgagccaagcctcagaccttctatggagaatgagcaccagggttctagggctgctgatgagccaggcacggtcaacaacaatgggttgtttccaaagcagtggcttccttgtacattcaccaactattacctggtaagtgacactgaatgggacatagactacagctgtgtcaaagggcattttgattgttcatgtgtttctttttcactgcttatagttactacacctcaggaatgtacagtagacaagatgctgtaaaagtacaaaataaataacttttcagt

SEQ ID NO: 944 - protein, 974 aa, Mus musculus
KMEYNSKDAEEETEDEEEGLKEAEGEEQEKEEVTATSETDDDQEDLPSVLVPTVNIREERLINLAETPAFLCLHELHSKGKLPGTRMAELKAKYTLLHDTVVSTQESEVQLLENAKRFTEQIQQQQVCLQQAEDFPNVFTTEVCKLREQLLKYQNEYTAAQEREYNIQYRLTSLTEEKSIILKEFEKIPKPGEIEKKTRLLKESTEELRKEVIQRRLEIKNLREDVVLKQKQLVREQKELEELMEYQVGLKDDVVHHQSVPVQITKEIEKMTRKKVETEKKNIVLESELKELSDSLKKLENKVNTLAEERDDIMKEVEGKRTLLEVKEREYGQLLKLLELTKENEASSLAERGILDINLRNCLIDKQNYHDELSRKQREKERDFRNLKKTELLLKVSLDALTQAQAMNQRLLLEMEAIPKEYLTLPERRKELHKEVDLARRNLAQQKSLSEAEAKLVEQQIAQENKLLKEQESLRELVFNLGRMTQIKIDEKEQKAKDFLKAQRRYSEIVKEIKSKDLEIRLYKKRKHEIHRRLREFASLYDTIRNERNKFVNLLHKAHQKVNEIKERLKMSLNELEILRNSAVSQERKLQNAMLKHSNNVTIKESIQNDVCKITAKLQEMKEKKEAQLTSMDRLASMITVIEEEMVQLRKKYEKAVQRRNESGVQLIEREEEVCIFYEKVNVQEKIKLHQDVEIHIEKIRFLKLRIAEKQRQISVTRKLVPIKKSLDADLAVIQIQFSQCTDRIKDLEKLFVNPDSKGRVRFIKGKDLTEEEMIKKLDMLELQIAKKEEKLLEKDFIYEQVSQLTNRLKGKTQACKKDTLLLAKKMNSYQQKIKVVTQEMMALVAELSMKQALTIELQKEVREKEEFIFSCSARIEKGLPLNREIEKDWLKVLRDEEMYAFATAEMSREYMDYRQLPNGVYTTAEQRPNAYMPEADTELPLPKPYGAMAPFKPSEPGANRRHIRKPVVKPIEI

SEQ ID NO: 945 - DNA, 78082 bp, Homo sapiens
  misc_feature (1)...(78082): n = A,T,C or G
tttttatgtttaaggcagctaaaatctattctccacagtttagtttttttaagagagatttgtttttttagaggagactgaaataacaaagtttatcaactaacattctgaacatctatgactttaccttttccaatttatgtagaaactgcaagaacatattcaggtgttttaccctgtcagctttctttgcaggtttgtaaggcaccaaaggccagcagaatgatagagacagaaaacaggaaaggaaacctctgtagttttcctgcttttctgtggccataaaactagccaacatgtatccttggcccacctacaattaggcttcaaaccattgctgtttttttgtttgttttctgagacggagtcttgctctgtcgcctaggctggagtgcagtggtgcaatctcggctcactgcaagctccacttcctgggttcatgccattctcctgcctcagcctcccgagtagctgggactacaggtgcctgccaccacgcccggctaattttttgtatttttaatagagacggggtttcaccgtgttagccagcatggtctcgatctcctgacctcgtgatccgcctgcctcagcctcccaaagtgctggcattacaggcgtgagccacggcgcctggccaccattgctgttaaagatgggactcaacttaggggaaatacagttgagcattcagtaagtcagagctagaatctgcctatatctgccactaggacctgatcacagtactctctaaattctaattctctctaaattctgctctaattccctcttgtttacagtgatagtctgcaagcacatttttaatagccttttgttattaaaagtaatacatattggaaaaattagaaaacacaggcaagcaaaaataaaaacataaaagcagcacattcttactacccagagcacatcattttaacatcttagttcttatccttctggatctctatatattcacatactcatatgtaaaataagatcatcttctacggacagttcttgctttctggcttaacaagatgtctcagcttcactttgtgtcttccctgtaccagacctgaaatcaaccatttctaacacttgctgcttccttttagtgggaaataagattaaagaccaaaatgtattaggagtgctcattgttgttaatgtggcattatttctagaccattatatattttttaacctttaagtttagtgatacaagtgcaggtttgttacgtaggtaaacttgtatcatggaggtttgttgtacagattatttcatcacccaggtattaagcctagtacctattagtagtttttcctgatcctctcccttctcctcccttccaccctctgacaggccccagtgtgtgttgtttccctctatgtgtccatgtgttttcatcatttagctcccacttataagtgagaacatgtggtatttggttctctgcccctgtgttagtttgctaaggataatggcctccagctccatccatgaccctgcaaaggacatgatctcattcttttttatggctgcatagtgttccatggtgtatgtgtaccccattttcttcatccagtctatcactgatggacatttaggttgattccatgtctttgctattgtgaatagtgctgcaatgaacatacacatggatgtgtctttataatagaataatttatattcctttgggtatatacccattaatgggattgctggatcaaatggtatttctgtctttagatctttgaggaatcaccactgtcttctacaatggctgaaatacttacactcccaccaacagtgtataagcattcctttttctccacaacctcagcaacatctgttattttttgactttttaaaaattgttatctttagttctggggtacatatgcaggatgtgcaggtttattacataggtaaatgtgtgccatggtggtttgctgcacctgtcaatcagcccatcacctaggtattaagcccagcatgcattagctatttttcctaatgctctccctcccccaactaacagtagccattctgactggtgtgagatggtgtctcattgtggttttgatttgcatttctctaatggtcagtgatgttgagctttttttcataaaattgttggcattggccacatgtatgtcttcttttgaaaagtgttcatttcctttgctcactttttagtagggttatttggctttttcttgtaaatttacattccttatagatgctggatattagacctttgtcggatgcatagtttgcaaaaatttttcccatcctgtaggtcatttaatctgttgatagtttcttttgctgtgcagaaactctttagtttaattagatcccgtttgccaatttttgtttttgttgcagttgcttttggtgtcctcatcagtaaatctttgcctgtgtctatgtcctgaatggtattgcctaggctgtcttccagggttattataattttaggttttacatttaagtctttaatccatcttgagttaatttttatgtacggtgtaaggaaagggtccagtttcaatcttctgcatatggctatccggttactccagcaccatttactgaatagggagtcttttccccattgcttgtttttgtcaggtttgtcaaagatcagatagttgtaggtgtgcggtctaggctatttaatggacaaagctagggaaaaaaattttaagcatgagttagttcatacttgtatttgcaattcaattttaactttgtagtgttttcactaatttgattttacaattgtatctcttttacacagaaaattgatttctaatgtaattgacattaaagttttcttgagtttaccataaaaatcactcttttaaagtgtttttaatggcttttagtatatatacagagttgtataatcatggcataattgtagaatatttccgtgacaccaaagaaaccttgtgcccattaaaagtcattcccctcacactagttgtcttatgtgtaggaaaccactaaatcaactttctgtctccaaagatctgcccactctggatatttcatataaatgaataacataatatgtggcctttggtgtcttgcctctttcacttagtgtatagatttcaaagttcatccatgttacagcaggtatcaagactccattcctttttatggctgaatattccatcctatggatatatattttttgtttgtccatttgtcaattgatggacttgtaggttgtttctctttttttttactattatgaatgatgctgccatatttgtgtccaagcttttatatgagcatatatcttcaatttaattgagtacactctttgctttttcacgtggatttgagttattgttccttctttccagcatgaagagcttactttattatttcttataaggcaggtgtgccagcaatgattttctctattttggtttatattggaatgtctttatttcctcttcctatttgaaagatatttttgatggatataggattcttggttgacaggtatgtgtgtgtgtgtgtgtgtgtgtgtgtctgttttttcttcactttaaatgtgtcagccactgccttctcccttccattattttagatgagaagttactcttatgtgattcccttgtacataataagctgtggttttttgttttgctttttgctgctttggagatttatctttatctttggctttcagcagtttgtgatgtatctgaatgtgaatatctttttgttgattctacttgggattctttgagctcctgaatatgttttcatcccatttgcaaagttttttatttctttaagtttgttttctgttctctttttctctagttctcccattacttgtaatttagtgggattaatgtcctccatttctgtgacaatctgtttgtgtgtcttcatgctttttctctctgttattcaaattatatacagtagtcccccccaccatctgcaattttatgttctgcgatttcaggtatctgtggtcaactatggtccaaaaatattaagtggaaaattccagaagtaaacaatccataagtttaaattgcatgctattctgagtagtgtgataaaatctctcatgttcccacaccatcccacctgaaatgtgaatcatccctttgtccagcatgtacacactgtgtatgctacccacccattaatcacttagtggctgtcttagttaccaggtccactgttgcaggattgctgtgcttgtcttcaagttacccttattttacttaataatggccccaaagcacaagatcagtgatagtggcaatttggatacgccaaagagaagccataaagtgctttctttaagtgaaaaagtgaaagttctcaatttaataaggaaagaaaaaaaagtttgctgagattgctaagatctacagtaagaacaaatcttatctgtgaattgtgaagaagggaaaataaatttgtgcctagcataaatgggtttggtactatccattcagggatcctcctggggtcttggagcacatcccccatgaataagtgggcactactgccttctctactgatctacaagtttaccgattgattcttctgcttgctcaaatctactgttgaactcctccagtgaatttttcaattatgattttctacttaggaatttcagtgtagctccttaaaaatttcttcttactgacaatctctatttgatgcattgtcatcatactctcctttaatttttaaaacatggtttctttcattcttcaaacatatttataatattttctttgaagtctttgttaaatctaacgtctgcatcctccctaagaaagtttctgcctgttgttgttgttttttttttttttcctctgcagaaaggaactggggatctcactatatgggatgggggtcatattttcttgtttccttgcaagtctcataatttttcattgtaaattggacattttaggtcatatattgtaacaactctggattctgatccttcccaggcttattgatgctgttttgttcttgttattgttgttcatctatttatttgtttagtgacttggctggactaatactgtgaagtatatttttcccccgcagtaggcagcctctaatgtctctgcttagatagttgttccttgtttttttgtttttaaacttgaattcctgggtgttgccctcggtcagtcactgattggtcagaggtcacgcttaagctcactgagccagtaaggttttcatccttttccactgggtctgtgtgtggcttgggaacaacttttggagttcgaggagtttatatatctgccacttttaactcagggactgacttggaagtaccctgtctggttgatcttgggtggtcacagccgtgggcttttccacagtctcctggaccaccagtatcaagtgtgaatttttttactgtccctcgtcccaatttctctgttaaacttctgctggtctgcatctattagcatcacaaaactattagcctactctgttagcccttatgatatctgtttttctatgtctgttattttttacattgctctgggacatgaatatcctacactctgttccaaataaagtcaaaggcagggctgcagagctgcaagtcctcacagcttgctcagcccccaacctggttagagcctctgtgttactgagcaggagctggggatatggggaactctgatctgttttgtttgccctgcccagggtctccctgtagagcaggacattagggagtgagtactggcactaccgaacagctacagctgcccatggggaagaaggggaggatgagtgctgagtgctaccgtttcttagatcttcacctgggatagatcttgatcctcagcaataggaaagtgggggacatgggcacctcactggctgcaagcctgcccagaatagttctgaaacctgaagctagagggatggatgcagcccatggttcaaatgccacagtttcttgctgagcttcagtagattttattgaataagtgtttctcaatttattatataaccttaggtcaatttccagagactttaaatggttgtctcagattattttgaccagttaaatcaatgcttcttttgtttcttttgtttgtttttttttttttttagacagaatctcactctgtcacccaggctggagtgcagtggcgtgatctcagctcactgcaacctctgcctctggggttcaagcgattctcctgcctcagcctcccaagtagctgggactacaggcatgcgccaccatgcccagctaattttttttgtatttttagtagagatggggtttcatcatgttggccaggctggtctcaaactcccgacctcaggtgatctgcccgcctcagcctcctaaagtgctgggattacagacgtgagccacagtgcccggccaaatcaatgtttctttgaaggagagaattcatcaaactcttcatcccaccattttggaagtcccacccaccccctggattggtctgtaatttataattttacttatttgctttaaatcagcagcccccaacctttttgacaccagggaccagtttcgtggaagacaatttttccgtggggcagaaggaatgcttttgggatgaaactgttccaccgtagatcatcaggcattacattctcctaaggagtgcacaacctagatccctcacatgcgcatttcacaatggggtttatgctcctatgagaatctaatgccactgctgatctgtcaggaggcagagctcaggtggtaatgctcacttgcccgctgctcatctcctgctgtgcagcccagttcctaaagcccaggggctgggaactcctgctttaacttgcaatattaaaacattgcaaaatgccaaatacaatcatttacttaaaataaaactgcagaatgtagtttcagtattctatcatttttttttttgtatctatctcttcaaactttggcctaccttaaggcagagcctatgttatattcatttctgttttttttatgcagggagcattaagtaggaagtaatggtctttttagcttaagaacaaaactaaatactatctgtttttttgaatatttgagtccacaattaccttacccagtagtttaccttcagaaaatggctggttagctagttactgggctagcccctagttggtcttcattgtacccatatacatacaaacacacactcacatatttaccttttcataatcttttcccagcaacttttctcctttaagtgtgtccatttgtaaaggcttttttttttttttaacttattagattttaaagccatagtaactatggtctgtatactttgggaaaccaatgaaaatgtttgaaacatgaaataaattatatattggctaaaaaatactgcagaaccaaaataaatatctgtaaaatgtaacattaagtcgacttaccaacagcaactcaacagttaaaaagttacaaatagaccgggcgcagtggctcacgcctgtaatcctaacactttgggaggccaaggcgggtgggttgcctgagctcaggagttcaagaccagcctgggcaacatggtgaaaccccatctctactaaaatacaaaaaattagccaggtgtggtggcatgcgcctgtagtcccacctaattgggaggctgaggcaggagaattgctagaacccgggaggtagaggttgcagtgagccaagatagcgccactgtactccagcctgggcaacagagcgacaatccatctctggggaaaaaaaaagttataaataaattatatttaaggtggcatatgaatagattttaagatatttgatacaggtagagtatcctcaaaggtcttaaagatcttgttcaccatatttcacccatagattaaaaaaataatgagggttgtagggattggaagccaggcctggcaccagatagtatggccctcatgaaagatccccaacactttcacaaagaagaaatggtttcataatgcatttaacatttttctaccctgatgcgggtagaaagaccacgaaaccccactgtatagactcagacttttgcattttgatagctgcattcattcatttgctaacaaatataagcaatttacctagcacctgggtatactgtgcctgggattatactgtgcctgggattctagtaatactttggctgaggatacagtgaaggacaaggtaatctgggccctttcctcataggtcttatatactagctggggaagtataaaaatgtttttaataatgtaagtaaatttattcttgcagattgtaatgttatgaagctcagcgttctttagaggtaggagcaagtacacgtggttatcttctttagatttggaagtcagaaaaggccttcttatgaattcatatttaagctgagacatgaagaaagacttggagtgaagtagggggagtaaggaatgactaatcagaggccctggagaaaaagagagactcatacatctgtggaaatcaaaggcagccagtgtggcagaagcaatgaagcactgggagcttaaagagtgtgttgtgaaaggaggctgtgggggtgttggggtcaggcaggacctcaaggtcttgaataccaagggtcttgaattttattccacttgaagtgttttgatcacccagcataacataaccttgtctgatttttaaaaagatctccctggcagaagggcagttaggaggtttagtagtggtccaactgagagatgatgagacttgggccagtgggatcagggaaggaagaggaaagtggatgaattcaataagcactttagaggtaagggccaggctttcacgcctgtaatttcagcactttgcgaggccaaggtgggtggatcacctgaggtcaggagttcaagaccagcctggctaacatggtgaacccccatccctactaaaaatacaaaaaattagctgggcgtggtggtgtgcccctgtggtcccagctacttgggaggctgaggtacgagaatcacttaaacccgggaggcagaggttgcagtgagccgagattgcaccactgcattccagcctggacgacagagtgagactccgtcataaataaataaataaataaataaataaataaataaataaatgtaagaacaacagggctgaaaaacacaaatattctctttagttctattttgatactgtcactagcagttgaagtcaaacctaatacaaatgctcattgcattatgattttaggatggtaaaactttagtgtttgacgatgttttatgatgtctgttaactaattatcacctaactcagaaaacagatcaaaagtcattttaactagaaataaaatgggaataaatagtacctctttatgcattggaaaactttccatgcttctttgacagcagaggcaaaggcatcacggtacaggggagtgatcgtgggtttttggagctgaaccacttgggtttaaattctcaccctgcctttaactagctctataaccttgaacaaatcatttttctaaactttagtttcaaatggagatgataatctttatttcacaacatttttaagaatgaaataactgatgggcaacacatactctaatagctgttcaataaccattcattttctcaacttacaaatagccaacctataatctacactattcagattgtttgttaaaccttgaaattttttttagagttagaagaatttaactcaatcctctcaatttccagacaaagaaataacagcctagggagttgaaaagacttgcctgaggacacagaatgtactgggggcagaatagaactagcactattttctccaaacacctggcatgtttccagtacactacattgcctcgtgtatcctctaatgtttaatggaggattttataagataaccatatatccattccatcccctgcttaagcctaaagagaatggtgattaacagtgaccttatgttctctttgctagttacatgctatgggaaaacttcctggaaccagaatggcagcgttaaaagccaagtataccttgctgcatgacgccgtgatgaggtatgcaatttaccaatatggagacatgattaatcacctttaaatttcttactggtgatgagacctgtcttcatttgcattcccccataagcagaccctgaggcaaggatttgcgttcagggagtttgagaagtggtacgagaaagcatcgtgagagagtggggaagtgcgactgggaaggaaggaatctagccttgatcaggccgtgtacatctgcgagtttatatgatgggctactggggctcagcctcacagaggagcctctgagtggctcacctcagcactctcccactgaagagtgaggaaactggaatatttgcccaccagtttccaccactcatttattacaaattacttccagggagattagctcttggcacttccagcttgcgctttgacaaaccaagcaaactttgatggccagagacagctctcaggcggagggacacaggtgctgctgatacatatggtaactgtccactaaagctgcaggtgggcaaaaggattctggtgggacactgacagtctctgcataggacacacctgcaggactcttctcccgtgtctgttcatcactcagaggtgtagattctccaacaaccccagcttgagtctgctgagaccctgtctgtacttctcacctcctccccatatcacaagctacttacaccttgcaagtcccaatcaccaacaggtcagaagaacaggctatcatagaagagtccagcaagcctgcctgagcactggctattagccactgggaattaagagggcaggggagtgaagaaagagggaaaaccctaatgtgctgtgattctttaccactcccaagcctctttctttccttcccccacctcttgtctcagggccttgcattgtatcttcatcaaaagccaaggagcaacagcaacagatagaaactccatgctgccactccccagccatcctctccccgcaattcccaatcacttcccctccttcttatcttgcccagagatatttggctactttgagggtaaaagcatgagggaagagtgaacaacttggaaaagagcagagctgcattcctatgcaaacttcaagtgcacccaggttcctcacacccctccaaagcccccagccttggttcctcatcctcaagcccaagccaagtcctcacccccacacctaatggaggttccattcccccgtagctggtcacgcctgccagtgtgttctcagagttctcaaggctcaggaattttgagactttaagtggaaagtctggagtaatcttttacaacatacttcacactgcttaactgagaggaaatgccatgcagttctctgggcatccctccaatcctctttgcagatacaaggaatatcagtgtttcctgccctctggatagctcttctttttttttagacagagtctccctctgtcacccaggctggagtgcagtggcctggtcttggctcactgcaagctccgcctcccaggttcacgccattctcctgcctcagactcttgagtagctaggactacaggagcccgccaccacacccagctaatttttttgtatttttagtagagatggggtttcactgggttagccaggatggtctcaatctcctgaccttgtgatcctcatgcctcggcctcccaaagtgctgggattacaggcgtgagccaccgtgcccagcctggatagctcttatctagagcccagtggagatttgcagggtgctttgacttaacttcctcctcccctggcccacaactcagttccctggcccctaatgacaagtagcaatgcaggacctcagctatggcactatttcttcctcttccaggttgtgttgcaaaacagttaacttcccttctgctacccacattttacatcttgaccacttagttccctctaatgccattgcaaatactcaccattctctcctactcccaatgcctgatgggtgggaaaaacatgaagtagactcttcattcgtgctgctaggactacagctgggcagatatagcctggaaatattgaactgaaactgaatgagtcttccatagaaaccatgttataagagttgttaaagtctcttctactggtatcatgttttaaatacatgtgggtaagttgcgatttgtgttctggctggaaccctaccaccctgtcctttctatgcaaaaacaggcactgtagcctggtccaacagcttacaatttcaatagctgaagcctgacctattaaggagaccagatgactttagatttacaaagtttattagcatacatgaaaattgaattataggagaataattccagctttcattaatgaaaattatttgaggtatcactgtagctattgttgttgctatttggtacctaacatcatgcctggaacgtgttatgtcccagtaaatgttttgctagatgctattgagcaaatgacattataaaacctgggaaaatggatgtatctgtactgaattgagaatatcacaaaggtgaggcagacacaaggtaacttcagttgagattggcttgatcaagtcattgggcgtctctgcaaatgagctggaacttgaagatttatcttggtgaggacagttggtggggagcatacatcaaaagagagctctggctctaaaacaggaagtggtgagggcttacttcaaataggagaggtagctaatataagggtttctgggaaataggaatcatatctactggtaaggttggagccgatgcttgctgatgctagcttgcagcatagaggagttctataagatactggagattccgccatgtcctttttctacatcctctgacagatgtttagtccttttccctacatagggccaaggtcatagaatataactggggttgtaggaatctccctctaccgtgaccttcaagtccatccagctctaaccagtgtccaatttagaatcagaaatctgtaaattnnnnnnnnnnnnnnnnnnnnaatcagaaatctgtaaatttatttatattcataattgcgtatgggaatttctcttcctagtttcctaataaagtgccattagaaaagtttctgttttttcatagttcactaagtggggagagattttcctacaattatgttacaagaattcaagagagctagggttgtttggggagttcaagggaaaacctcctctttccgtatcatttatccccttctagtaagtcataatcattcttcaaagtcaagttcaaatgtcacattcccattgagtgatcctttctctgttgtctcctgctgtcttgatctggacaccagcggtagtacttgtcatctggtattcctctgcatctgccagattgtaagattcttgaagctaggagctaagccttattcacctcttgcacctagcatagtacagtcatctcttggtatccttgggggattgattccaggacctcctgcagataccaaaatccatggatactccagtccctgatataaaatggtatagtatttgcatgtaacttaatcacatcctcctgtatactttaaatcatttctagattacttgtgatacctaatacaatataaatgctatgtaaatggttgttatgctgtattgtttaggcaatcatgacaagaaaagtctgtacatgttcagtaaataaacaatttttaagtaaacattttattttggaataattttagattcatagaaaagttgcaaaaataatatacgaagttcccgtctatccttcacccattttcctctaatgggagcatcttacataaccatggtccatcaaaactaggaagttaacattcgtatattactattaattaaacttcagattttcaacagtttttccactaatgctcttttttttgttccaggacccaatgcagtataccccactatatttagccctcatctctccttgatctctgtgacaatttctcagtctttccttgttttttttaaatcacgttgacattttttgtttttttttttttgtttgtttgtttgtttttttgggtttttttttttttgagatggagtctcactctgtcgcccaggcgggagtgcagtggctcaatctcggctgagatggagtctcactctgtcgcccaggcgggagtgcagtggctcaatctcggctcactgcaagctccgcctcctgggttcacgccattctcctgcctcagcctcccgagtagctgggactacaggcgcccgccaccatgcccagctaattcaattttttaacaaaaattttccctcgtggttggttgaatccacagatgtggactcacggacatgaagggtcaactgacttggcacaaaaatgtcccagagttgagttgatctgaggagtggggagcagctatcctcactagacccccacaggagccaccgaggatgtacatgtctcattatgtgagtctctgtttttcatgtaacccagcacacaagagtcagaggtccaactgctacagaatgccaaacgtttcactgagcaaatacaacagcagcagtttcacctgcagcaagctgataattttccagaagcattctccacggaggtctccaaaatgagagaacaacttctcaagtatcaaaatgaatataatgcagtgaaggaaagagagttccataatcagtacagattaaataggtaagtgcacagttctctccggcacactgaaaagtcttttcctcataaatagaaaaaaatcagattaagttggaggtaattgaaggagtaggagatagcagtacgatgatgattgcaaacctagttctcttgattccttagaatggaatgggaattccctgaacaagaaagttacacttctcgaataaaagctcaggtgacagagatgcctgctgtgtttttcatgtcaggaaagccatctcattgagagctgcagtcagagaacacactccaccaaaccagttattagcattcccttgcccttcccctgccctggcagtggccccctcatcccgtgactatagcagtaccagagcacgcatctgcatggtgagcacttctccccacatgcattttccaaacaagcctccatgagctgagggtcacatgtcatctggctcactctattcttctaagagagcagcaacaggaccacatatgcaaacttcatctcctactactagattgttcctcaggatcaaggagaaaaggtatatccttttggaagacacatttacttatccaaatttagaggacgtcatttagtgaactaaagcagacattaagtgctaaaaggggaaatgttatcttcaaaatctcttctaacattccccccatggagtagcaagtcactggaggagtttgttcagcaagtcatactatttagattgaatttgaaaatgattgcaattcaagttttctgctgtggtgtgctgtgtgctgtgcctgggtacaggagagaaagcaaaaccgtttctcctagagtttgttaccatttaaggtggcagaactttctctggctatttttaagagtaggtggacttctgacagtgcaaatataattcagtccttcctagagataagcaagtgacttgagcaacctctcaaagaccttgtaagccctgggtttaaaatcctctctttggggcctattttttcactggcggtgggtgggggtggggtgtgaataaagaaggtcagtttaatcaagagatcctattcaggggggaaaattggaggtttttttgtctttcaatctaaacttgtttcaggcttaccagtgagatctatataaaaagaaagcccagttatttctgtgctctgtaagtgctctttcagttgagaaaataatgaaattaaaacaattggtggttgttcattagcattgaaaatatgaatgcttgacatttccatgaaagagtaagaagaacataagtcagttgatatttaaattgtttaaaatttccaactattcctgccaagagaaaaaaacaaaaacaaaaaccagaacggttgccctttaggtatagacaggcacattattcactgagatgggaaggagacaatgcatactgacctgcggtgaataagaacattcaaaatgcacatttgcagaaatgtttagtgtgtattctttttgaatttataatgtatcattcttaagcttgagaagattcccttgcattctcaaatattaacagctcaagaacaagcttattttcataaaagtaatggtgatgccaaaagaaataccagtaaagaatgaagggctatgcatttcattggcttaacatatttagtatcacagtcatgcaccacataatggtgtttcagtcaacaatggactgtctatatggtggtggtcccgtaacattataatgaagctgaaaatttacttttgcctagtatttactattcgatacattttatttttattttggagtgtactctttctacttatgaaaaaaatattaactgtaaaacagcctcaggcaggtccttcaggaggtattccagaaaaaggcattgttataggagataacagctcctaaatacctgccagtgggacaagatgtggaggcagaaaataatgactttgatgctgaccctgtgtaggcctaggctaatgtgtgtgtttatgtctgtttttgttattgttattgttgttgtttgttttgagacagagtcgtgctctgtcgcccaggctggagtgcagtagtgcaattttggctcactgcaacctccacttgctgggttcaagcaattctctgcctcagcctcccgagtagctgggattacagatgcccaccaccatgcccagctaatttttgtatttttagtagagacgggatttcaccatcttggccagggtggtcttgaactcctgtatgtctttgtttttaacaaaaatgtaaaagtaaaaagaaatttaattaaaaaccttacataataagaatacaaaggaagaaaatatttttacacagctctacaatgtgtttgtattttaagctgtgttatgagtcaaaagctgaaaaaagtaaattttgtaaagtaaaaaagttacagtaaatttattatcaaagaaaaatattttttataaatgtagcctaagtgtacagtgtttataaggtctacagtagtgtaagtaatgtcctaggtcttcacattcactcaccactcactcactcacccactgactcaccctgagcaacttccagtcctgcaacctccgttcatggtaagtgccctagacaggtgtaccattttttatcttttatgccatatttttactgtgtgtattctttgtttagatacacaaacacttattgtgttacaattgcctacagtactcagtccggtaacctgctatgcaggtctatagcctaggtgcagtaggctttaccacatagcctagatgtgtagtaggctacaccacataggtttgtgtaagtgcactccgtgatgttcacacaatgatgaagttgcctaacgacgcgtctctcagaatatattcccattgttaagcagcacatgactgcacatgacacagaaaccaattccctccacaccctcccactgacctccttccccctggaaaaagtagatatttccatccccacataaaaataaagagatgaagctaatgagagaaaactattcatccacatatacagatgatatttgtcagaccagcacaacaaactcttattgaatttctagataatagaagcccaaataactagcactcctccaccccaatatcttcaggaacttctgaatcattggcaactactaagaacaacttatttttcaaatactctagagaaaggattttactgtgtaattttgtcaatttttttgtgtatgttcacataacataaatcttttaatgttaataaatctaattatctggttggttggttggttagtaattaaatctatgttgcagtagtttctgtttctggattaatatttatgacttgataagtatgcagttcaggaaataatatgtaatctatttaaagttaaattaatacattgtaaatccataataaagtaattaaatacagttgagcttactttttgaaacaaaacaggagtacttacctctctaaacagtttgaaaagatttttcagtactctcttcaacctttgccttgccttgattgtgttaccttttggggcttccctgttttctagtaattcctaaaattttacagcaaatacgttgcgtctttcatgcaaaatctgacacattctgaccagtcttggtcagttgggggaaacaaggctgtggtgagctggcactgtctgttgcactgtgaacccggagagtgggaacactcaggccgcacacgtgcagggctgtcctgacgtgaccctgaccttggtgactgtctactctcccgtggctggttcctgtggtccttgttgcacattcagggtttattagttgttttccattcttggtccagtgctgatagcaaagttggaaccaagaaacaacagatctggtaacaaaggaaaggaggaatgatcttagcaacacatctggaattccagaaaattagaatgtgacagaagaggcatgtaggtactcaggagtagtcacaaggaaaaactcatagctagaacagattttaccttaacttaaaaaaaaaaaaagtttgctcttctgtggcaacaaatatcttaaaagaactaacttagttagaacaggtttctctgaatgtgtttctcattactcaaaaagaagcacctgagacacttgtttgaaaggaagatcccatccaaaaagtaatgattatgatttttgccccagcccaccgcccccacccaaagtgacatttgcttatgtgactctgactcacattatagttagaggaccgtgggttccaaaggtggttctcagccctgactggtcagtcaccagagtctcctctcagtgatcattcagtctatgcataaacacttccagtgacaggaagctctcagcctcccacagaggctcacgccaactttggaaatgctcctacacttaaatggttgttggatttgtttataaacctaccttcttgcaactttcacccacccatgctgtttctacttctgtggtgaatgatgcctctcacacatgtcagcatatcgggcttcctgcattatctcttcacccatagatccttaaaaccaaaagccttttgacgttgctttagaaaggaagtaaatcctaaggagctttgatgttgaagcaccccttagtcaggaaagctgaaaaatgtcagatttaagttttactgcaagtttgaaaggttaggagttaatacataccaggaggcatagaaacagaaacatgtttttgccccagtaatcccatgcaaaagtgataacccaaaaggagagaaaaagatataatgcataaagatattgatatttatgaaagtgaaaaattggaagcaatctgaattctcaaaaaatgtggaatatttaaataatgcattccagaaataccttgttactgaacctctgtagtcagagcggtatttgtgtgtcagtttagctttgactgtgtgactttggaaaagttgcttaactcctcagtttcttcatttgtacaacaaaaatcacaattcctacttagcaaggttgtgaattttagatatgataaatttaaagcacctggcacacagtatgttcagtatatgataaataatacttaagattattttattatggtatatctacccagtagaaaaccttgaaaatagctattattataaagtctgtttagcaacttaggaaaatattttaattaaatgttaggtaaaaatggattcaaccacacatatacatttaaaataagtttattaaaagataacagggaaaataaaaatgatcaaccatgtgtgatggagtaggattataatctttaaaaatagaaaaatacattccttttagaggaaataagtcagtatttcttaataaaaaaagaaaaatgtatcatagaaatgtaagttttaaatgtcctaaagaattagtcattttatgtttgtttaaacataaaaatatacttaaaggaaagaccataagtcacatcttgtgaaagagcttgctgtcaccattttgaaactcaaatactcaggttgcctttacaaccgaaagatagtagcacactactaccccctggtggcagcatgcccaaggtgtaggatcaatacctgggaagtaaaataccactaatgtatatgcaagctctaaaagcaaaggcataactatttaaagatctaaactcagcttcaatttgtggtctagacaactaatctatattaaattcaatgtgacacatgtattacaaaattcatctacattattgcaaataaaatgtcaaaaataacataatcccattaaaaagtaggcaaaggacataaataggcatttttcaaaagaagacaaatggctaagaatcaaatgaaaaaagttcatcactaatcagagaaatgcaaattaaaaccacaatgatatatcattttataccagtcagaatagctattattaaaaagataaaaaataagatgttggcggagtgctgagtaaagggaacacttatacattgttgctaggaatgtgattggtacaagctctatggaaaacagcatggatatttctcaaagaactaaaaatagaactactaatccatctggcaatcctactattggctatatacccaagaaaaagaaatcatatccaaaagatacctgcgctcatatgtttattgcaacactattcacaatagcaaagataaggcatcaacctaagtgtctgtcaagagattggataaagaaaatgtgacatatatatacaatggaatactattcagtcataaaatgaaatcatgtattttgcagtaatatggatggaactgaaggccattatcttaagtgaaaaaaactcacaaacagaaagccaaataccacatgttctcataagtgggagctaagtaatgtgtacacgtggacgtagagtgtggactagtagatactggagacttagaagggtgggaggacagaaggagggcgaaggatgagaaatgacttaatgggtatacatgtatataatttgagtgatggttgtaccaaaagccctgacgtcaccacactgcaatatatccatgtaacaaaactgcacttgtatcccttaaatgtatacaaatgagaaaacctggtgtgcatgtgcttttagctcatgttcctagatctatggactagtgggatctggttatttgttataaccagtggacataattgtctgtgtattcatttatttcatatgattttccaagtgtgatcaatacaaactttaaaatctttccatatcgggaaatcatatgacttctttggcacttaatagttagtcattaaataaagaatagcaagaaaaatgaaaaatatttctctagatttcttcaggaaatctggtcaataaaacagttcaaaatacggttattggaagaaacacgcaattatatcgaactcattttgtttagaacattcaagctatttgaagcaatttccaaaatgtcattctagcatcgtgtcctctcatcttattagttaaaataaaaatataaactttttttgtattttctcatgaataagtgaacaaaaccatatgttcccattcactgtctgtactttctaatgtttttatttcttttgtttgttaatctcaatttacaatgatgactggcttttagaaaaactgacatttctttctatagatgccaagtatatccaattgattgatgggattattgagtttgactatgtccttaactgatcttctgacttctggatctgtgcacttttgatagagggatgttgaagtctccagctgtgagagtggattcatctacttctccttgcacttctatcagttttgcctcatgtattttgatgttctgttgttaggtgcaaatatattaagaatccactggccgggcgctgtggctctcacctgtaatcccagcactttgaaaggctgaggcagtcagatcacgaagtcgagatcaagaccatcctggccaacatggtgaaaccctgtctctactaaaaatacaaaaattagctgggcgtggtggtgcacacctgtagtcccagctactcgggaggctgaggcaggagattctcttgaacccaggaggcggaggttgcagtgagccgagatcgcaccactgcactccagcctggcgacagattgagactctgtctcaaaaaaaaaaaaaaaaaaagaattcattaggtcttctcagaggattgactcttttatcattatataatgcccctctttgtctctgataactttttcttgctctgaagttcgttctgaaattaatttagtgactcatctttttttaatgttagcatggcatatctttctctatccatttacttttaatatatatgtgtctttatatttaaactggattattggcaaacacagcatataatttgagtcttgtttttgtttgtttgtttttctttttggatccattgtgacaatcttttaactgacatttaaaatgattactgttgtagttgggttaatatcttctgccatattttcactgttctctatttgttgtgcttgttcttcattcctgtttttgttctctctttttatgccttttgtggttttaactaagcatttaatataattccattttctctcctttcttagtatatcagttgtacatctttttttactttaagtggttgccatggagtttgcaatatacatttacaactaatttaagaccattttcaaataacactataccacttcaagtactttttaaatcacaaaatagtcctattcctccttcctatcccttgtatcattgctgtcattcatttcacttacacatgggcatacataaatatatatgcatatgtaattgaatacattgctgctgttataaatttgaacagtgttatcgagtatctcaagaataagacaaaagcttttcttttaccttcactgattccatagctaatgctcttcatttgtgtagaactgagtttctgacctatataattttccttccctctaaagagcttcctttaacatttcttgcaaagcaggtctattgacaaacaaatgtcctcaatttttatctgagaaaggctttatttctcctttactttggagaataatttcacaaggtacagagctttagtttggtggttttttctctcaacactttaaatatttcactctactctcttcttgcatgtatggcttctgaggagaaatcggatgtaattctttgttcctccataggtaagtgtgtttttcctgtaacttctctcaggaattttcattatctttgactttctgtaatttacatatgatatgtctaagtgttctttgagcttcctggatctgtagtttattttcctgcattaatttgaaggaaattctcagacattattgcttcaggaatttctcgtgttcctttctttcttctcctggtattcctcttatgagtatttatgccttttgtagttgtcccagagttcttggatattctggtattttcctagtctttttttttttttttttccagtttgggtagtgtctagtaagatatcctcaagctcagagattccttcctcagccaagttcgttctgttagtaagcctattagaggcattcttcatttctgatacagtgattttgatctctggtatttgtgtgtgtgtgtgtgtgtgtgtgtgtgtgtgtgtgtgtgtgtgtgtgtgtgtttggttgtttgtttttgagacatagtctcactctgtccaggctggagtacagtggcacaatctcggctcactgcaacctttgcctcccaggttcaagataatctcctgcctcagcttcctgagtagctgggattacaagtggccgccaatacgcccagctaatttttgtattttttgtagagatgggatttcaccatattggccaggctggtcttgaactcctgacctcaagttatctgcccgcctcagcctcccaaagtgctgggattacaggcatgaaccaccacgcctggctgagtatttcttttttattatttcttagaatttccttctctctacttaaactgcccatttcgggattgagtttatctgttagcgttcttagcctattagtcatagttgttttaaattcctgataattcacacatccctgccatatctggttctgatggttgctctgtctcttcagattgtgttttttgcctttcagtgtgccttgcagtttttttcttgatagccagacacgatgtactgggtaaaaggaattgctttaaataggacttcaggaacatggtggtaaggtgtggagggaggggagcattctacagtgttgtgattaggtctcagtagcagaggtcatatgtaatgggagcccacaggagccaaaattctgggggaagggaacctttggagctgtgattctcaagagaattaaaaagtctcttttgctcgctcgctcttgtgctctttctctcacacagatgtcagtaaatttgaagataaaaattgtccaatctgaacagagagaaaaaaattttgaataaaaacgaacagatccatggccgggcgcagtggctcacgcctgtaatcccagcactttgggaggccgaggcaggcagatcacctgaggtcaggagttcaaaacgaggctggctaacatggtgaaaccccgtctttactgaaaatacaaatattagctggacgtggtggcacgtgcctatggtcctagctatccaggaggctgaggcaggagaattgctggaacccacaaggtagaggttgcagtgagccgagatcatgccactgcactccagcctagggaacacagcgagactccatctcaaaaacaaacaaacaaaaacagatctataggcatccatgagacaataacaaaatatctaatttatgtcactggagttgcagtaagagaagagaaggtatatgattatgaaaaaaattggaagaagtaatggctgaaaactccccatgtttggtgaaagaaaagcccacagattcaaaaagctcaatgagccccaaacagggtaaactcaaagaaatatgttccaaatgcatcacagtaaaacttgaaaattaaaaatgaagaaaaaatcttgaaagaagcaagaaacgggcttcaagaatgacgctcatgtttataattttgaaaattaagtgaattgaaatgccattaccaaaagaaggaatagaaaaacagtaggtttcagatgggaagataatgagttttaatttgatgggcctttgatatacacaactggaattgcccagtaagaaattaaacataaaaatttggagctccagggaaattctgaactggaaataaggatgttgaacgcatcaccgtaactggcactgtggaaacggtatacagaataagaaaaggagaagttaggcttcagctagactatgcaataagaacaaatcttaaaatctcagcagaagaactcaatggaattttgtttctcactcatagcacagtccagtgcaagtcatgcagccacgtctgtccttagctttgccagcgggagcacgtgccttccaagttcaacatggctggggaagacatttgttacttacttccactcaccttccttgggcaaattagtccaatggctccaatccaaatgcaagggagactgtgaaatatagtccccctgtgtgtccaggaagggaaaatggtgcagcaaacaatgccaatgtgtctgtcacaagggccaaaggcagatccttataaacttagccaatgacaggatagaagtatagacaaggtgtgcccacctggactgcttatgagttcatgccacaattttaatagcttgtagtggaaacaaaagtgaaaataattgtcctcaaatacccatacctaataaccacttaggcttggctcctggtctaaatctgcccttcacctgaaatatccattcagtctcttatgtatccatgtccctatcacatctggatctctgtcaagtttcctctggctctagcattcgttatacctcaggaatgcaattgtcacacaaaactgaaactgagctcttcgaataacccttcttcacacctttgaacaactgtggactcttctgtgatttctgtgagggttttctgcaatctggatgtagaagaatgtggtgcaataggtcattctgagtgacgatctatttccatatgcatgcccgtatctcattggggacatacattattttaaataatgaagatggggacaaaactaattctagttccatttattcatattaatttttactggatggcaactatatgcaggtactttttaagacaatgatgatgcagtggtaaactgggagctaggttttctagtggggagatgtgtaatataatgtcaggtcatgatgaatactgtatagaaaagtaaagcaaaacaaggaaagagttttgaggactattggtactgttttagatagatggccaggcacctctatgagaagacgatatcggtacaggtctgcatgaagcaagaagtgagctatgcaaagatctgtggcgagagcataccagctggagggatcagatagggcaaaggccctgaggtagaatcaagcttggcaagaaagccagtgtgactggtgacagagagtggcaggctgtgagactagaggggctgatgaggcagggccatgtaggtttgggaaaggagttcaaattttggtccaggtgtgatgggaatttatcaagcagggaagtgaagtgatcttatttacatgttaaaaaatcactgtggtatgggtggagaattgactttaatgggcaaaggtggatgcaggcaaagtaggagatcgattgggaggctgtagcaggaatccaggcaggcacccgcccattccaagtaacataaaggagaaaaagcccagagcctgctgggaaggaccctgtgtcccgaggcccgtggtccccaacatttataatgtgctgagataactcctctaagtgggttgtgttcacaaagttgggtgggagtcctggggaggaggaagcaccccaatgcacctgtgattcaggaaaggcgtcataaagaatggacaccaggttgcctggcagacaagcatgggaatgacattctgggatgagaagatagaaagttgttattacagaaagagcttatttctttgtactttttcaaacttgattttttttttttgcagcttaaaggaagaaaaaatcatcatagtaaaagaatttgagaagataacaaagccaggagtaagtcttagatgatatagagtttcttaaatacagctggattcaatcatccctttttataaatattaatgtttatcacaaccaccatagcctgaaacattttaaagattctaaagtcttaactgtgaatgatgctgaaaagactagctacataacttctggagtaaatataagtgatgcctattatagactttagcaacttggcatctaatttaggctgtatttagttggacaatatctgctttgttttcagaagaaaaaaaagattctgtggttgacactaaaaatattattttgctatagctatcaccctcatagctctctgaacatctcaagttattacaataaatttttacaaagaaaatgtatcacttatctattcctgcctaacaaatcatcccagaacttagtggcttaaaacaacaaccatttcattttttcacagttccgaatattctggtctgagctggccgaattggggctgggtaatctaggatagctccattcatataccagccgtttggtaggctacttggtctaaggtcacatgtcactagttggtcacatgatggtggaagggtttccagactcaataaagagcaaactccaatatgtaagacctttttgggcctctgctaaaatcatttttggtaataccccattggccaatgcaagtattataacatgggcaagtctagaatcaagttggccctacctcttaatgggaagaaggatcaagacaatgcaaagggacatgcataccctgcagataggaggaattcgtggccactttttacaatctattatagaacgtaaatagaatggtcaccatactttgcactccttccaccttctgataatccaaaagtgtgttggtggtggtttaattccaaggccagctcacaataaaacctgtttagcatagagtaaaatactattaattcaaataagtatgccaaaccatcatttacaatacagattttatgggagaaacattttgaattttcattcagatcctaggatcaccaatgatgctctcacccagcagtggtgggaggagggagctatgcagaaagcccagggcaggctaaatagacccagcacttcgtcattagtaagagtaacgtgtagaccttctgagtgtaagaagccttctctcccataagtcaaaccctccccaggtaatcagacatgagacaaagatctttgatgattctggggtagatggtatttggggaggatgtgcatgagctagagaagtaatatcaataagaaagtgggggattaaggagtgcaaagtgttgggtatccaaatatgaacacctttgtctttagttcccatgtgactcaggttaaccataagtcagatattcaaagattattggcatctgattttgtcagatcacaaagctactagaaaacagactgtacattttttttcatgcttcttggtatgaaataaaaattaacacataaaatgaaacgtttttaaatgtaggaggatagaaaagagcactaataaaataattcaaatataatgttgtgtttaattatacatgcagtatcattatcatgcctttgttaaagatgtcagaaatcataagttgcatttagctttatgagaaatcatttaaccttgtgagaaatcattcatgaacttcaaaacaaatataatcaaaatggtgggtgaaattagttttagttcagtttttaggtagataaatgtttgctcagactatataacctaatcatcttcacgacttttaaaggaaatggagaagaagatgaaaatattgagagaaagcactgaagaattacgtaaagaaataatgcagaagaaattagaaattaaaaatttacgagaagatttggcatctaaacaaaagcagttattaaaagagcagaaggaactagaagaattgttgggacatcaggtcgtcctaaaggtgtgctacttaccgttgatatttaaacattgtgccttgcatggatataaaagtgtgtgggtatcaagagtaaccagcaggttggataaagaggggtattgtctcacaaactgaaatatctgcattgcgattgatcctatcaaactaaatctaggctctgggaatgcacaaaagaccttagggtgtttgggagtatcactcgataattcggagccctcaccctgcggaaaaggtctctcctgacctcaccaaacatttctggacattagaaacaagtgtcacaaacacaattgtttccttgaagaacaaccatggccaggcacagtggctcacacctgtaatcccagcactttgtgaggccaaggcggtggatcacctgaggttaggagttcgagaccagcctggccaacatggtgaaaccctgtctctactaaaaatacaaaaattagccgggtgtgtgatggtggatgcctctaatcccagctacttgggaggctgaggcaggagaattgcttgaacccgggaggtggagattgcagtgagctgagatcgcgccactgcactctagcctgggtgacagagtgagactccctctcaaaaacaacaacaacaacaaaacgcacacacacacacacctacacacataccaaaacaaccaaatgtcctaacctctcacatatatttgtattaccttatccttgtcggagtgcattccacttcctctcagtagaaaagggatgagaggcctgtatttatgttttaggagataatgaattaaaattcattttactttgaaaaatgtataaatgactctcaaaacagttttaataacctagagttgttttaaaaacaacatctgaaactcattggcttaggggataatggtgatacactttgacctgtttttctataacagtcctagagcagacagccaagatgtgcccagctactgtccagaacacaggaccctagcagagatggatttaacaggaacccagtgaagcttaagcttcaggcccctcacttgcatgaacctcttccaagatgctgcacctaagttagcatttgtaattgtttactctttctgttaacgagggcccccaagattgtacaagtttcagccccacaaaatttgatctgccccaggactgagcaagatcccacagagaaatgtctcgcccaccacactgcagtgacggattcaacctccctgcgtgtgtgttacccctggctccaaagtccaatgacaacctcgggcaggaaggggcttttctataacccttgctgagtacgtaagactcttgagacttcagctgaacctcccatgaatccacagagcatagtgggaggtgcggtgttagaaaaacttagcttctgagcttggccttgccacttactagctgtgtgacttcgggaaacttatttaacttcttgtagcatgagtcttaggcagggctccccagaaacagaccctaagacaactactaatggagggagaactctaaggagaatcctataggagatggagggaagcaggatagagctggggaagaagctgggccagaatacagctgcttcagaactctagtctcagcctgatcccatggagaactcaagaagtcatgagttgcatcacagaggctgttgcacccagaggtgggggtggggggtgtctgttagatcaccacatcagttagtcattggtctcagcttgctcccctcctccctccaccccctggctcccattccctgacaaggcagctctgctcagccagtgacaatctgatggagaggagattaagcatgatccattagcagtcacccctgcagcatttgagggatgggtgggcagacgggccctggcttatgatggttcagcttatgatttttctactttacagtggtgtgaaagcagtatgcatttagtagacaccacgcttcaagtacccatgcaaccattccgtttttcattttcagtattgaataaattacatttattgtacagtattcaatatgttatgtttatttactgtgtggcactcaacactttattatataataagctttgtattaggtgaactgtagactaataaaagtgtcctgagaatgtaggctaggctaagctatgatttcagtaggttaggtgtattaaatgcattttcaacttaaggtagtttcaacttacaacgggtttattgggacgtcactccattgtatgtggaggagcatctgtacctccataaagggaatctgggcagaggaccaacagtatttgctacactcagttacctcctcttcaaaatgataacaaatatagctctcttacaaggtcaccgtgagtattaaatgggataattaaagcacacagggcagatggtaagtatctacatattgtagttcctttctctctcatatttaattttcttgtcttaattgcttctagccgaagaccgcataatttaacatgatttcgtttctttactaggatgaagtggcccaccatcaaaccattccagtacaaattggaaaagagatagaaaaaataacacgcaaaaaagtgtatgatttaatatttttactttgaatccctgccagtccaagttatgtgtgcacactagaacaagagtactaaccattggacacattaaattactatgataattttagaaatttctgctttgggccctgtctaggttgtttatatcaagttctttaaaagaaagtaatgcaccaaatttctatcattcatagtatttatggcttaattatgggtcaagattctgttgccaatttataaatcatatttttatggagaagttcaattgactttaacagagcggtgcatgggataaattatgcgaactggttagaatttcatagtctagaagtatatcagccaggcagcagcccaaagcccaaataatagtaactccccactttgccacccattcatgtgtataacactcctcagatattcagagtagattgggaggcagaggtcattgaggaaattctcagtgtttaaggaaccaaaaaagataaagattttaagtgaagatacaaaaattttggaaaaataatataattactctggtgactaatcttaaggggaaaaattaggcaggcactagtaactgttctaaaaactaagctcaccaacatcaaagttgagaaactcaggtcagtttcaggaggctggtcaggacgagggttgaatcacaggagatggtagcaaattgggatctgcacagaaagtagggaggctgggcaaattcctgccttccgtggcactcagtggagataccctccaagtcccacccatctgtggtctttacccactgctgagatcattgaatttatgactatctcttctgctgcatggttagaaagcaagaataggtaaagccagcatggcctcaaaataaggcaagtgtgtgtgtgtgtgtgtgtgtgtgtgtgtgtgtgtgtgtgtgtgtgtatcccctacagagaaatggaaaagaaaaaaattgtcttggaacaagaagtcaaaacgctaaatgactccctaaagaaagttgaaaacaaggttagtgctatagtggatgagaaggaaaatgtaataaaggaagttgaaggcaaacgagccttacttgaaatcaaagaacgagaacataaccaattggtcaagctattggaattagccagagagaatgaagcaacttcattaactgaaaggttagttatatttatgtatgttatgttctgtcatctaaatttttcttcaatttatatttgagaattcaaaatctcactttggtgttgagttaataaatatttaaaaataattttaaatcaacttttacccttaatatattatcaaataaagcactttgaagtattttttgatactttactcaaattttctcaattttctgttaccagattttcaggatataatctgttgtatgttgtaagtttctgaatgtgcctttggaaaatttatcactggagtatgttatgttcagggattttgccaacaaatgaatgatacttcttaggccatcttgacttttttctaacagaagcaatttcgtggtgtaattccctaggagagttttatgtcctgcttttttgtttgttttttgagatggagtcttgctctgtcgccaggctggagtgcagtggcacgatcttggctcactgcaacctctgcctcccgggttcaagtgattctcctgcctcagcctcccgagtagttgggactacatgtgcgcaccaccacgcccggctaattttttttttcttctcattagagacagggtatcaccatgttggccaggtggtctcgatctcttgacctcgtgatccacccgctttggcctcccaaagtgctgggattacaggcatgagccaccgcgcccagcctatgtcctgcttttaagtaaaatttcaaggaaactggaggcttctatctctgccagtctgttatttttttggggggtgggggttataagactgcagttctaaatgataccaactcacaaacctagttgcctttggcattatttacaatttatgattccaacatgagaatagtcatgtgtgtatatactgagcatgctgtcttttattaaacttttaagttcaaggttacacatacaggtttgttataggtaaacttgtgtcatggggggttgttgtacagattattttgttatccaagtattaagcctagtacctattatttttcctgattctctccctcctcccatcctctaccctccaaaaggctccagtgtgtgttgttcttctctatgtgtccatgtatcctcatcattttgctcccacttataagtgagaacatgtgatatttggttttctgtccctgcattggtttgctaaggataatgacctccagctccacccacgttcctgcaaaggatatgatctcattctttttattttattttttattttttattttttgagacggagtctcgctctgtcgcccaggccggactgcggactgcagtggcgcaatctcggctcactgcaagctccgcttcccgggttcacgccattctcctgcctcagcctcccgagtagctgggactacaggcgcccgccaccgcgcccggctaattttttgtatttttagtagagacggggtttcaccgtgttagccaggatggtctcgatctcctgacctcatgatccacccgcctcggcctcccaaagtgctgggattacaggcgtgagccaccgcgcccagccctcattcttttttatggctgcataatagtctgtggcatatgtaccacattttctttatctggtctaccattgatgggcatttaggttggttctatgtctttgctattgtgaatagcactgtgatgagcaaatgtgtgcatgtgtctttaggatataacagtttatattcctttgagtatatacccagtaataggattgctgggtcaaacggtagttctgtttttaggtctttgccagaagagattgggagccaatattcagcatgctgtcttgataagttttgaaaaacatttaggacagctgataacaaaatcattttcttcttcttcctttacctggaacagagggatcttggatctcaatttacgcaacagtctcattgacaagcagaactaccatgatgaactttctcgtaagcaaagagagaaagaacgagattttcgaaatttaagaaagatggaactgctcttgaaagtgtcctgggatgcacttaggcaaactcaagcactgcatcaaaggcttctattagaggtgagggctgtaaactaccatctgatttttaagctcggtgctaacttttgaagtaaaaatattttaggaagttgtttttgctgccagtagagaagaagaaaatacaagtaacagagaaaaggtaattttcaaatgcgtcaagcctattatgaaatctatagtcctataatgtttcgtaatctcatttttctaacccaagattagagaaatatcttgtttggatcagtcatccttcagcctgacctggggaaatgactggactatccagttctagaagagctagagggttcactgcagaatggggccaagtggatcattattttcaccagttgaaggagtcagatccggcatggtgtcatggcagactataacagtgaaggactagatcaaattacatagacatagatgatcagcagcctgcacttccgactagccaagggcaatccagaacccaatatcaggctgcctggctaattctgtgcagggtcagaggtgtactccagtcagaagatgctcaagacaactgttacctgcctctgtgttcccaagtgaggggtctggttgcccctggctctcttttctctcagagggcactccctgtggtaaatgaccaagcgccactgaaagggcagaggatccttgagagggcttcagccttgtgctagagccttccttgagcgaaaaaggggtcagcctctgagatgaagcagctaggtgtatagaaaccttccccattctcttcaggactgtcatgctccagaaccttatggagggtcatgacctaagaaatttgaacaggagtttccagctgtggtagacacctctgatcctaacctatgcctagttctcctctcctcctgggcacatagaaagtttatacttccttgcaccctttgcagttgagcagagtcatataactcattctggccagaggattgtagacaaaagtgacacgtgtcacttccagcctataacatctaattgccaatgtgagaccctctagctgtttttccctctcctgtggtaattgtggaagtgcatgacaccatggaggtgctgtaaaatgggagcagccgggaatgctgagccaacagtggtctcagagtcctcttgattgcccaccggctttgtaggaaacagctttggtagttcgaagccatgatatttggaggtcgtttatttctgtagcataacttagcctgtcctgactgaaagaccaaccttaagcaacatgtgtgaaaaaatcggttagggttatgagtgttacgaacaactaggacttggacttcgtcttgctgtcagatggcacttataatcttttcaagaagttctctggttgggcacagtggctgctgcctgtaatcccagcactttgggaggccgaggtcggcagatcacctgaggtcagaagttcaagaccagcctggccaacatggtgaaaccctgtctctactaaaaatacaaaaattggtcgggtgtgctggtgcacaccccatgatcccagctacttgggaggctgaggcaggagaatcgcttgaacccgggaggcggaggttgcagtgagctgaggttgtgccactgcactccagcctgggcaacagagccagactccatctcaaacaaaaaaaggaagttttctatctcagtgaggcaaaatgtacttttatagtcttttgcaaaaccaataaaacatgtatgttctactatatatgtgttttcacaaataacttttatataactgttatatatagtatatttatgatatatatacttcttatttaatcattttattgcaattccaacaggtagatttatttgtatcactctgaaatctctttaactctagtagtactttttgccttaaaatattattttgtctgattttagaataataacatcagttacactatcttttggcgtgttagattctgcatggtattatttactttgatttttttttctttttctttttggagacagtcttgctttgctgcccaggctgaagtgcaggcaccatctcagctcactgcaatctccacctcccgggtttaagcaattctcgtacttcagcctcccaagaagctgggattacaggcatgtgccaccaatacacagctaatttttgtatttttagtagagacaggctttcactatgttcgccaggctggtctcaaactcctgacctcaagtgatccatctgcctcggcctccccaaagtgctgggattacaggtgcgagccaccgcacccagccctatttaccgtcactctttctgtgtcctcattttggtgtgtctcatatacacagcacatacttttcaaaatctagtctgataagttctgcctttttaaattcttgtatttagtctaaaaattaatacttaatgtaattgtggatatatttgtcctatcgctgtgatattacttttgctttctctgtatcccatccgcttcatgttccattttctctcccacatttccttccttgggattaatcaacgtttcatatagttctgctatccttgttttagatatgcatcagttagttttacattctatttctattctttgggtggttaccctgaagattacaacagtcatctttgacttactagagtcaaatataagttatttgtatttttactacttccaagacagtgctaatacctttgatgattttaactttactaacctttgcaactcttatgccctcaaacatattttcactccaactttccaagttattcttgttggaagcattggtttactataagctactccatcttagcccgaagcacagcacgttaggatgttaaattggaactttgggcaaacacagaccctgtggccacccctcctcagtcatagtaagatttatagtagaccgcagttataatgtccattcaaagtactgacggaaacctcagtgtaatgagtaagactcttaaaaccagcaagtgttgcttgtactaataaaacaattcctgtttattgatcaaataactgttcagtaagatttctttaaacaatgggataaaatgtataattacctttaataaccaattttggtagttatggtagtaagtaaagttaatccattcaatatgcttctaatgctgaatcatcaaagcattcttaatattgaagagtaaggtaacctaaatagaagcaataatttgtctcataaattaatacttcttagctcaagaagggttatacattggtaaaaatcacaagattggttctaaaagactacacacaaaaaaacagacttaggttcacttctaccagaaaatctagattaagtaccatagaagggacacataaacctaatacacaatgtaatcctactacttccacttctagttaaaatagaaaacattgtgatggaccatcgtttctgctataccagccagaaagaaatcaataaactaaaaatcacatatttttaagagacatatgcaagtaggaagtaaattccacaaaggcatcatcacttcctggtgagcagaaacaggtggccttttgcctccctgagacatttgccaagtcgagacttgggcaggtggaagatttgcctgccataggcagaaagactttgctggggttagtcaaaaccatcagagcttttaatgaccatgtgtgttggcatgacaaagtggaatgaattacttaaccaaagacatcatactgtcatgtaatatcacacatgacggtatacctctgcatttaaacatggctcttattgacttccacgtggcactgaaaagaaagaaaaccatgattcctaggattttgctctgacaccatcatgttgtaggggttagaatatcatgagtctgtgaagttatttgctttctaaacataagatcatgtccaagattgtgacaatgacaaaatcctcttaccaagtgaatatgacactttctatatactgtaatttttctttaattatagttttctagcaatttcatctccctttgctctgatttaaaagtggttctgcatttttctctcttcatgactcatttcagtgttgaaggcaatgataacaacatactatactgagaagagcttcacctttgagtcaggcacagtcaggttcagattctagatccattgaattcctacctatgttacttgtttccaaacctttgaattgggattattgcaaaaaatgagtgactgcaaatgggaaagtgtgtggtaccgagaagatactcagtaaatattgccttccttcctttatacatatgaactctttgaaaggctataaagtaaatggtatagtcagaatgacactgtgaatatggctattttattcatatggagaagatgacatcatcaggccctactgataaaccccggaaatgcctctcagtacccactctgcattacctaaatgactgcagctctacaccagctgttctccataggtccagctcctttcatgtccaatttttcctccatcttagcccaaagcacaaatttatattcttaagtgacacattcatgtgtcactcacctgctcaagacattcaatggatccttaattcacataatcacagaatgaaggaaccaagaggaatcttaaagatcatactataaaagcaaacaggtttcatctcaaatgccagctccctccatttgggggtagctccctgtagtgatgataatgcaaaggaattttttttttttttttgagacagagtctcactctgttgctgaggctggagtacagtggcaccgtgtcggttcactgcaacctctgtctcctcagttcaagcaattctcttgccctcagcctcctgagtagctgggattacatgcacccaccaccaagcccagctagtttttatatttttagtagagatggggtttcaccatgttgcccaggctagtctcaaactcctgacctcaggtgatccacctgcctcggcctcccaaagtgctgggattacaggtgtgagccaccgcgcccggcccaatattgcaaaggattctgaggcccagtgctgacttgtcagatagaagctctgtagttgattggtgatgtctgccccaggcatagaaagtctgtccatgtatttcccattcctaatcaagtcatcttcctaatcaagcgctgtttcttcagccagttcttttggtatatcttcataccccaagtaacatgcttatgatgctgctacttgagttttcagttgtagacttgatcttttttttttttaatcactataaaagatgaggattcagccctctttagacccctgttcatcacaaatacatttcttgtccctctgtatacacggtattctcatgtcataattttgattagttcagaatttgttattattatgaacatataaaggctattcgtgcctgagccatgtgatattatataattacccttacaaaattttgtgttcccaggaatttataaacatcctgtttttacacttttatagttttcggtgtgcttatcagttcaatcccaaattcttctccaattatataaatctcctctcagtatattaaaacacatttgatggcctattcatttactcttcttgaagaaatctcttctaagcctcatcaatgacctctagccaaagactaacaggaatacatcagcagttgaatgagctgagtttattacatattgcagcaagggagaacacacgccatggagaattgtagggagtctcaatagagggtattagaaaggacttacaggatatgtgtcatgtgacttgaggaacggtttaaagaaatgggactttgccctgaattaggatgttctcaggaaatgagagtaattctgtggtagagtatcttaaattttacctagaaaaagaaaagattagatggagaccaaaactgtgattgttaaacaaagctatacaaggggaatttatggtattttgtggcttggacaatgttcatgtttttgtctatgttcaaatacagttatggagtggccttgtttttgtcctgatccatcatgattacagaggggctttgtctgaagttgatgttctgggcaattgtttatgttcaacaggggaataccaaggcctacctatgagtaccagttctgctcctggatatcaggggctgcctttttctttctcagccttctgacttgttccaaagtagtccatttctgtatgtgcttactgcactgctctcattctaggagccttactccatcatcttgctgatgcccttcacctctcttccgactctatttcatgggtctcatctattttattctcttagcttacccccttttggaggaggggacatgccttccagtagcttcatgagaaaaatgttagtgaaaaagtaattgtttaagactttgtgtgttggaaattgtatgtcagaagaccttgcatgctaaaaaatattttaccctcacactagccatacagacaattagtgctttaattggatatggaattttaggttggaaatcattttccctcaggaaaaaggcattagattaactgccttctagcttcactatgaagaagatttgatgtcattctaaatattgatcctttatttgaagccatttttttttccatgctgggaaatttgtaggatctcttacttgcctccagaatttttacattttacaatgatgttcccattgtatccatcgtgtggggcactgaatgggttctctgtctatggaagtatatgtccttccaaagttctgatactttgtcttggattatttaattttgtccatttgattttctctattctgtcttggattccttttacgcagatgttggaccttctaaaacagtcctctaattttcttttttcttttattttcctttcttttttgtcatttgacttgctaaaagagaaatttcctcaagttttcctttcaacccttctactctttcattatgctatcatactttatatttccttgtgctctctttgttctctggatgtttctttttcatagtatctttaatctcttatctcattgaggctattaatgatggtttctttttcttcttcttttcctaaataagactttttctccgtgttttttctgtatttttctttttttgtttttgtctctttctttttagaaactttcctccaatatatggtaattcttggctatctgcttatatttaagcatgggctgctataaatctaattggaagctgtctgtgatggtgaggcttgtcactgtagtttgatctgactggacacaaaatatgtgaggcatggcctttgaccgaagaggagtttgcagtggaatgcgcacaagttgttcagattttaacaaatattataaaagctatttatattatgacactactagctattaagtccacaaaatagcacccattgaatataaaactaagcgcccatagaatataaaactaacagaaattaaagtgtattagaatccttttcctttgttgattttaagaaaaatctggttttgttctagtacagtttcagtgagagactaacttcctctttgaccctgtgatttataattagcccagccactgcccacagctggcagtacttgaaaacaggagtgggtcaggccaggcactcccagcccaagtgaacattttttcagacttgcatgcaatccaaaactaaaagagataaaaggtaaacatgaagagctctagctattcttcagaatgtatttccccccagagacagttgtttgattctcctatggcgtttgacttgtacatagagactctcccagaaactcaaggtacaagcctcatgaaaggttggaatgctttagaaaaatatcaaagtgttaagctgaggttcactgatatcaaataattgggatatttacagcaacaagtaatgtctaatttcttaacttttatgaaagttaccgatgattattcatgcattgaaaatgcctggaagaacagacaccaaaactattaatagtgactcctggggagtagtacttgaagcagcagaggtaggaagcagattttttttttttttttactttacacatttctgttgtttggtcacaatcacaataaatacatttttaaatgtgaaatgctacactataaaaactaaaagaactatcataagcttacaaaacctgatatatgcagtttggggctcaaaagaaatggaaaatatctcaagtaactccagaccatgtagttagaactttgatacttgatagttattttcctcccacattaatggagacttcagtctaactccagcctattttccagattaccttgggaaggtttcctttcaagagaaacacctattaggttaggtttgcaatttggcctcaatgagtaatagaaactcaactataatgattttgctaaatagggagttgttttactcacttaataaaaagagcacaggtaggcacaacaggttatttcacataatgaaaagtctaggatccttttagctcccctttcagtcaaccttagtgtgtacattgtttctccatggtcagaaaatggctattccaccttaagcataaactggcaaaaggaggaggaagggcaacgagcaaaagacataaatgattgctggcttggccagctccttttaacaggaaaacagccactttcccaggacccctcctcacagacttccacttacatttcattggcttgtcttagctcatatgggcacccccagctgcaaagaagtgtgaggactcctggatacattgcagctctggaaaaaaaaaaaaaaaacagcattctgttgctgtcgtggttaatactaaatgtcaatttgattggcttgaaggatacaaagtattgatcctgggtgtgtctgtgaaggtgttgccaaaggagatgaacctttgagtcagtgggctggggaaagcagacccacccttaatctgggtgggcacaatctaatcagctgccggtgtggctagactataaacaggcagaaaaatgtgaatgagagaccggcctagcctcccagcctacatctttctcccgtgctggacccttcctgccctcgaacatcggactccaagtttcttcagttttgggactcagactggctttccttcctcctcagcttgcagatggcctattgtgggaccctgtgatcctgtgagttaatacttaataaactcccctttttattatatatatatatatacacacacactaataggagatatatatatatatatatatatatatatatatatatggagatacaaagaaccctgactaatagagttgctaagatcaaggtggagggtagctattggctaggcaaccaggaggtctgctaccaatggcttatcatgtcacctcttccacaagccaagcctacctaattcctgcctgaaactagagagctgggctttacagagaatttaaaatggtatcagagaagcagtagccagagttcaaaaatgaatacaatttattgaagtattgtttgtgtttcaaaatattggaaataaccaaagtgtctagacctcaagccagaaaaatctgtcgagagcctttagttgacatagtagctagtgagtgtgttctcatcatattttctgtcgaaacctcataagggttcctgggccctgttattcacgtttagatctgccgacacccgggagctgagcatgaggacagcccactccaggcacacctgtagcagagaatcagacagggacccaggatgtttgctggagttcctctatccaggaggtcttaacttgactttcctaaaggagaaatcaacacttccttgatgaatattcacatcttccaggaaggctttcccaattattcaattctatactgagttctcccttttctgatctgctatagcaattttatgtttgttaagcccacaacattctgtatattgtcagacatgtttcacaagaccacatctcgttttcctaagtccagtgtgtgcatctcaagagctagtgctccagggtaggagacccaatggaaaagcaggacatggacacctgagggtacagaaggtgctactgaagataccctgattcatggatgatggggcatccaaagacacactttagtgactttaacatagcagcatgatcctcaaaaagatcctgttaagtaaccttcaaatcactagacagtgtgatattcctttcttgggtctaaattttggccattattcaaccttagggcctacaagtgtgtgctgtcacagtaggaactgaaccacatcagattggagtcatgtgcttttggtgtaaatagccaactctaaacttgctctaagtcaagtaggctggaagcaccccaagatgaccctccctgtagccttgaatggtaccctttccccatcagctgccacatgtcctcctctctactctcgtcttcatcacaaagaatctgacaagctcattcctaatagggcaacaaagacttaaagagtgagatttgccttttccctaaagtacgtcaacacaggagaaaagtgcaagccgttacaacagaaatgtaatggtgaaattttaggtatcaaccaaaaagttgaggcttttcttttgtgtaagaaatttccagctactaatcaaatgactatatataagtagcaaactatccccactattattaataaattacatatttttctttatcctatacaatttcataaatgtactcacattttataataactataatttgaatagtcatagtatattcatgtctccaaagtgctgggtcatgagttagatgagttaggcagatcatgggttccaagtctacctccctgggtttacacctgcaccattgaggcaagttgcttaaatgtgtttgtgcctcattctcttcatctgtacaattggagaaaatattccccacctcatgaggggtattgtaatgatgaaataagatcgtatacacaggcatttagaaccttgctggacacttggtttatgttcaataaatgttagctattagtaagatttatttctaaataataaacatttgcagctggcaaattatagatttttggcaggtcttcatattttaatttgccatggcttataaagaatatttggcataaagggaagttcttataagattgagattcgtgatttgctcagcattttcaaaaagtgtgtgatgaggttgactacacagcagtgaattttatttatttatttatttatttattttcagacagagtctcactctgtcacccaggctggagtgcagtggcacgatctcagctcactgcaacttctgcctcccgggttcaagcaattctctgcctcagcctcccaaagatttatttcttacataaatgcatgtttttaaattttgatttccagatggaagctatccccaaagatgattctacattatctgagagaaggcgagagcttcacaaggaagttgaagtagctaagaggaatttggcccaacaggttaatatcaatgctcatttaagcttctatctaagaagcgttcatacaaagttgtgcttttaactgtgctccacaaaaccttatcaataagagagtcatcaaagagagtatgatcctgcttcatgtgggcatatttcttcatctcaaagtccactccaatcctacactaaatttgagaaaaaagaatatgtttgaaccgcaaaaagtattcaaaggaatgagatttttaaattatgggctgttgattacattaaaagtaaaccacagatgttttatttcaccaatgtctaatttcaaattttcgtttgtttttatgtgtcttctttttcttagtcacttgaaaatacagtctaaatacaaagaggttctatcatgttaacccatcgattttcacattattttacaaaatgaaaacaatgaagctaaaacaccattactttatttttaatttttattttttttatagagagggatcttgctatgttgctcaggctggtcttgaactgctggcctcaagtcatcatcctgcctcagcctcccaaaggcttgaattacaggcgtgagccaccacacctggcctgtttaaaaaaatacattttgtataggaagtaaaaaggtagtctaagatactagctttactgtattacttcaaacaaataacttataatattatctgtgttttttttcaaaagaaaattatatcagaaatggagtctaagttagtagaacaacaacttgcagaagaaaacaagcttttaaaggagcaagaaaacatgaaagagctagtagtcaaccttctccgcatgactcaaatcaaaattgatgaaaaggaacaaaagtccaaggatttcctgaaagctcaggtaactgcatttttttaaccattcattgataactacaagagttcagggtagcctcattataatgccacgtgcattaggacatggatgaagctagaaaccatcattgtcagcaaactatcgcaaggacaaaaaaccaaacattgcatgttctcactcatagatgggaattgaacaatgagaacacttggacacaggaaggggaacatcacacaccggggcctgttgtggggtgaggggagcggggagggatagcattaggagatatacctaatgtaaatgatgagttaatgggtgcagcacaccaacatggcacatgtatacatacgtaactaacttgcacattgtgcacatgtatcctagaacttaaagtataataaaaatatataaatattaaaaaaagaactggaaggaaactcaaaaaaaaaaagaaaagaaagctatacaattgacccttgaacaacatggatttgaactgcatgggtccatttatacacagatttttttcaaccaaatgcagatcaaaagtagagtactcacagaatacaaaacctgcaaatatggaaggcccacttttcttacaggtgagttccacagggccaactttgggactgcttgaatatgcttggatttttgtattctcaaagggtcctggaaccagttccctatgtataccaaggaaccactataactgtgcctctccttcaagtaccagtgactataaatcttccctaaatgagattcaatcatgcactgaaagatagtcccaagattcaattaacagtaatcaacaatttagatgggaaaggagatcattgataatgatcggaggatttgaacagatggcaatttcagtaagaataaagtgggtgcctccagtggacagggctggcagctgcataggctgcagatatcatttagttttcactcccatctcagactccactgtgatttgtccaggaacaactcaagagtggtagcattaggtaactgtccctcccaacttcatcaagacagcatcatttaatcgaatgccagatacccttagttgcttcatcacaccatgattttcctgggcctcctacaaagtgccagtgcaacattcccccctaaaatcaacaataaaacaaatggtaaggcagcactcctgtcatgcaagctaaaattctaccattagaattgtttattccatataaggattatgtccagatcatgcccagaagctccctgttaaaaataaacaggatattacatattactaaaatagaagaatttatcaggccaggcatggtgactcatgcctgtaatctcagcactttgggaggctgaggcgggtggataacttgaggtcaggagtttgagaccagcctgaccaacatggtgaaaccccatctctactgaaatacaaaaattagccaggcatggtggcagatgcctgtaatcccagctacttgggagactgaggcaggagaatcgtttgaacctaggaggtggaggttgtagtgagccaaaatcgcaccactgcattccagcctgggtgacagagcgagacttcctctcaaaaaaaaaaaaaaaaaaaagaatttatctcatgacccagatgtggtctgtttggtctgtttctaagcacatcccttgttctcagtctaagtaaggatttacatagaatggtatttcttctcattctgcagaaagagctcactcacaccaaagcattagtgagcaatgaggtatgaagtagatttttgcaaaaaagagaagatctacattgcacaacccactgcaggcacttcacatccccctttcactgtttatttttctactttaatatttaagaaactaaaagaagttcaggatggctggcacatgggaagatggggagaaaggatgtcaaatagtgagaccagagagcgggacaagtcagatgatgaaagtcacttaatccatgttaaacaatttagactccataatgaaggctgcagcaagagtgaagttcatggagtagttgggtttcactaggtaaagaagtggtcagggaggactggatgaaagaaaggcagcttcaaagcacagggtggctaagcgggtaagatgcaggagcaggacaaggagaggagagaggagagatgtgagaagatcatcttgggccaggagcggtggctcacgcctgtaatcccaacacgttgggaggccaaggcgggtggatcacctgaggtcaggagttcaagaccagcctgcccaacatggtgaaagcccatctctactaaaagtacaaaaaattagcctggcgtggtggtgggcacctgtaatcccggctactcaggaggcagaggcatgagaatcgcttgaacccaggaggcggaggttgcagtgagctgagatcgcgccactgcactccagcctgggtgacagagcgagactctgtctcaaaaacgaaaaataaagaataagaaggaaggaagggagggagggaaggaaggaaaagaaggaagaagaaagccatcttcaccaagtcagggtctgggacaacttggtgttggctgggaagatcccactcaagtgagtctttcctagttagaaacttcctcccttttctctttagaaattacagaaacaccagaggtatacttatttgttataagaaacactgatccgttttatgaattagataattttcaattaatttcaaaaactgatatacatgtatatctatgtgtgactaatctatgtaaagcaaacctcattattaaatgagctaatttgtattaaaccaaaatagacaattcttcttgagatacagaaattgataaaggacaaatgtttatcccttgagtatttttagcattaggaattagtgtgttaaacattacctgtacttagctgcagtttccataagaaggcaatcttttatgttcacattgcatccacatccctaaagacaaaggtgaagaaaaaaaaacaatgtcactatcacccccaagacagaatagatgacactacattttcccatctgttttattattcatgtgtacagttacttaaatattcgtttcttcctgacccctattctcatggagaacagcattagaaaaatgctacacatcaatcttggctctatggctagtttctttcaaatcactcataccaaaagggctttgctctcagtccttgagagaaggctgacaaactctttcctctggtttctagcagcaaatccttcatttttgaatatgtttcttatcccagatgcaagaaccagtatcttttgatttgaagaacataactagtgtatttagcacttgatatattttttagaactctagaaatataactgctttcttttaaaatatttatgtgtaacacctccttacagctgatctcaatatgatgccttattatgtaggaaaacaccccacatacaaaagaatggaaagcactttaaaatcattgcttcagtctctgacaaaacaccacagagggttcagtttataacactcaccaaaacttactaggaatcctcttctctcatctattttccataaactacactcacccagtccagctgtgtggttcaaaatcactcttcctctctctcaaaagttgtccaaacttttcctcaaacccaagccatgcaggctctttgcgttttctcttctctcgtttgttctcttccttaggtaacagttaacagtttgtcttagccaatgtgaatcagttcagctagccagggaattttcagatctcttttacccttcaccctgatctgtacaacccagcaagccaagaaataatttttttttttttttttttttttttggagagacaggatcttactttgtcgcccaggctggagcggagtgatgcaatcatggctcactgcagcctcgaattcttgggctcgagcgatcctcccacctcagcctcctgagtagctgggactacaggtgcacaccaccatacccagataatttttttatttttgtagagatgaggtctcactatgttgcctaggctggagaattgtctttaatggaagggaatgatgtgggataaatctgggagtgttcatatgttgttatttatttcacatttttttgtacatttcagcaaaaatacaccaacattgttaaagaaatgaaagcaaaggatcttgaaatcaggatacacaagaagaaaaaatgtgaaatttatcggaggtaaagtaattatgtggtgttttatctacgtaggtgaggggaaaaaaacctgatgttcatttcataagtttcagtaaacactttgtatttttacagactgagagagtttgctaaactgtatgacaccattcgaaatgaaagaaacaaatttgttaacttactccacaaagctcatcagaaagtaaatgaaataaaagaaaggcataaaatgtcattaaatgaacttgaaattctgagaaatagtgccgttagtcaagaaaggtaagtgttataataactattggcctttcaaaggcttgttttctgattcatttgaactctaaaaatcctggggataagaagataggaaagaggcagaggctgcaatgagccaagatggtgccactgccctccagcctgggtgacagaatgagaccctgtctcaaaaaaataataaaaataaaaaataaaaagaatagtattttagaaagccagaattagaaatccagaaaaagcccttgttcaaacatcttgttttatagatgataatctaccatgcttctactctttgggagtcatttttttaatgaatgaaaaaccataacatataactatgcttactatgatgattttcacctgcccaattagaaagaaaagcacaaatctaataattgggattgggaagttagaaaacaatcaaatcgtttgttaaccaacatcccctgattgtagatgtaaagcatctcatgtgttgtgggaggcaatacgttatagcagattggtgaaagaggtggtgtccagactcaaataccacccctcccacttattacctctgtaaccttggacaagctgctttgtctctctgagctcactttccttatccataccatatttcatgcgacattttactgtgaaatgagctaattcatataaaaacactcagaaaagcgtctggcaaatggttgttttcttcatttattatttaccatgtgccaagatcttctggactctttcacctatgttagtaaacagtacacgatcagggtataatctaattttctgatggccattattgcccagtttccttcaacaaagcaattataaagtggcctcatttcaggggtcgggggtggatgaaaagaaaaatatgatttcctaatcaggttctcatccaacttgaaaataaaatacatttatagaggccatgcattcattcagcatttattgtggccacaggctgagtcaggcaccaccttatgtccagtggacattattggatataaccatctctgtcctcaagacagcagtctcctgagaatgacaataaatgaatgactgcagtctctcgctttgataaagggggtcagcagaacattggggggaaaaggaaagatgttctaatctggagcagagaaaatctgagacctggaaggattatgaaaattcctgaagagtatcataagatgaatatcattattactagtatcatttcaagggctacactaaagcaaggtctgctttgatagtgcttgtgtttcagaagccttcattccttttaaataaactaaagaaaattataatcttacccattgtcttattactttaaaagaaagctacaaaattccatgctgaaacacgccaacaatgttaccatcagagagagcatgcaaaacgatgtgcgcaaaattgtatcaaaacttcaggaaatgaaagaaaagaaggaagcccagttaaataacattgacagacttgccaacacgatcacaatgatcgaagaggagatggtgcagcttcgcaaaagatacgaaaaagctgttcagcatcgaaatgaaaggtaaaaaccaggtgtgagaacagagcaccagggatccaactgaggaatgtcacctctttttctatctagacttgacagtgaatagtgagggaaatgtgatattcaggttgcattagcctttggagagaagggactgtgtgttgcttccctggaaaataagaaacactgtcctcacgctgggcacagtggcatgatcccagcactttgggaggccaaggtgggtggatcacttgagctcaggagttcgagaccagcctgggcaatagggtgaaaccccatccctactaaaaatacaagaaattagccaggtgtggtggtgggggcctgtaatcccagctacttgggaagctgcagcacgagaatcgcttgaacccgggaggcagaggttgcagtgagctgagatcgtgccactgcactatagcctgggcaacagagcaagactccgtctccaaaaacaaacaaaaaaaaaaaaagagagaaagaaagaaataccgtcctatgtcataaacaggcaaagaggaggggtttgggaaagttgcttgcttttgaagatcaatgtcctttcctaagtggtcattcgggttgcctcttataacatcagattctttcagcataattgacataaataagtgtggaacttgtacccaatgttgtggtaagtttggtcttattatatttagccattctcctagttcatttgctcagcaagttagtaagacctttaggagtagcattatttcttccaggttgcagttatatcattaatcaatgtttacttcagcagtttctcccaagttacttgtgctctgagaaattggaatgtgaaatttgcagagccctgtgataatgacatctgnnnnnnnnnnnnnnnnnnnnnnnnnnnnnnnnnnnnnnnnnnnnnnnnnnnnnnnnnnnnnnnnnnnnnnnnnnnnnnnnnnnnnnnnnnnnnnnnnnnnnnnnnnnnnnnnnnnnnnnnnnnnnnnnnnnnnnnnnnnnnnnnnnnnnnnnnnnnnnnnnnnnnnnnnnnnccaggcttctcgttgtcaagagaacttgatcttgagcctttgaaaggaaaacagacaaaatatagagctgggattagctgagtacaaccacatgcatgcatgttttgaggaaggggagtcatagatagaagcaattaaaggaggaactctgaaataatgtatatgcataatgtgtgggaagacctttagggtcctttgaagaacagcacattttcaaagggctggtaggtttttctccaggggagaaaaaaaatgctattcagctcctggcacaaaccaaagcgtttggacaaacagtgtgcacccaggtgccactcagatcagtggtgcatgatcggtcatgcagaccagagctgctggggttagaacattcttactttgtttcctccccatattctccattcaaggaggggtctttctcctggcatgattacaaaggatagatttttgcctgtttatggggaaatcacaaccagaaatattcaacttgagaagaaactaatgggcctagcaacttaatatagagcagactcacaccagaactacattccctggccccctgcctgtgtgcttctggccaggccttggttggcaagtctgacccgagaaaaggatctgcagaaaatcagactatgggatcactttgtttgtgcattgggaatgacattctttcccaccccaggaaaacctttgggactttcagagacattgtggctagccaaccacatggtcagcctcaaagttgagaggctcagtaaccctcctatccctagagaattccaaagtgtggatgtaatttaactagaaagccattggtgactatctgtgatcctctggaagtatgctatgttgtgtatatcttgcatccaaagccagagggaaccacaatgactagtaaaacggtggtctcaatgcccacttagcctctgcctctgaatttgaccatagtggcgttcagctgatagagcgggaagaagaaatatgcattttttatgaaaaaataaatatccaagagaagatgaaactaaatggagaaattgaaatacatctactggaagaaaagatccaattcctgaaaatgaagattgctgagaagcaaagacaaatttgtgtgacccagaaattactgccagccaagaggtccctggatgccgacctagctgtgctccaaattcaggtgggtgagtgatcacgggacacttcctcagaccatttatttttttctgcctttattagtttgtgggtgagttcttgcatgtaaaccaagccatactatttctgggacctataagaatccatccatcttgtttaaaaatacatttgaatgctactctaggatggaatctgtgcttcaggcatccaggctacacattgtctttttttcttatgaagcattttctgcttttcttggaatttgaagactcccaggacttatctctagctcagcttcctcatagctcaaaatttagtgatctagactctcactaccctcagcataattatgtcgttgctgcttgctggacagatcttgaggatgagccagcactcttacttttgatactctggcccccagagcaagagattgtctggagattgttgcttattagtagttgtcagttacatataacttgattctttattaaccactgtagttctatgatagcttagtaacctggcctttgacatggccttttttaaagtggaatagatccaaaaaactaaaacatgaaataacaaaataaataaaatgtgaatataaagttactttcttcacatgtgttacttggggtttattcttcatagaatttttttaaaaattaaaataaaaactgtgtagcctaaacttgttcccattgaccaatgtagcaggaacaaattctaacctataatatttttttttaaatgtcaggtttgcgtttggattttttttcctgataaaaagttaagacatttggtgaatgaaattttgtaaaagtataaaaattataaagaagaaaataaaattctactcccaagatataattgctattaaaattatcaaaaatctgggagacatcttgtcatttattttctaggtatacaagtaaatgtttttcattagctcatgccctagacagttttagatcccccttttttttaatcatgtgaaggggattcataggatttcatgggactagatgatagatctgctttcatattttatgccatttgaatgtgtatatgctgtatagataatagcctctttcagtttgcacaaatatgccaatgttctgattccaagtttgtttgtttttttaatttagccttgagttcttccactcatttcttcagtaagtgtagtcagattgagatcgattggctagaaagtccccctaaactcccacaggcctccccaggcttcctgtggctctgactcctgcttccaacaaggttcatttgagggatcacccatcagcctgcacacacagtgcctgtgccacttctgtgccatgtctgcaaaggcacggaactcaccccttcctcaggctacacctacacaagaccattcatgcgaggcctctgtggacagactttattaaagatgtggggcaatggtatgtggggttacattacagaaatgcaaagcacttcaatttgatatcagatatccatactcttcttgggggcactggagacgcttccctgagcactaataccttgtaccacacccttgcctagctcgatttcactggcttctctttcacctcccctctccctccacagcctcctcatcccagattgcccccaggaactccatgcttgcccccactccattttacagaagaatttgtctctctccagctttttcccaaaatgaagatttaggtccatctttgcccatcctaaactatcaagatgcagagcaacacaaaagatctttaaattcaataaaatctgcaacagaataatttcctctctattgtataagcatattctttgtgttcactgcaaatcaatacttccattcagtggataaaattgttcttagaaaaaaaattgtcattttattatataaaacctattatctagtatgaaatgtaaattcacttttacccaagaaggaaatattatgcatttcataacactacactccctgcctgatggtgaattttgatcattttgattgcacatgaactgagacatgcagactgtgttatcagttatctgctctaccggagtgaattctgattatctgctcagcatcaatcatgtgtacccttgaaggatatgatgtgaaatttctagcttcaggcaagccatttctgtgccctgttctgcagtgtcagatcccggtcatatcctgtcattttttacagccacagtgtcttggggtttgttttttttttaagtcttctcccttttttgcatcattttcagaattctcttaaggtttgcatttttttcggtcgtccataacagtttttaattgtccaacaatctaatccaaggattatcatgagtctgttctcctggttcctataatgatagctcaattttaggaagttatatgaactattttgggacacaaggacactattttacatagacagagtaaacagtttttcctcaaatgccaagggaaaactaaaattgagacatccctttataagcaagcactatatttttgtttcttatttagtttcctaattaagaaaagggaacattaagtattgttaataataaatacaacaaatgcttgattacatatgtatgtacacttcaattctatattaaggacatttaagggatgtagatacaggaaaaagaaaaatgttaaattatttgtcagcatttgtaattatttttgtagggaggaggagcataaattaaattttaaaaatgctacctgtatcagtcttagacatgttgtaaaataccatcaatatattatctcatatgatggatcaaccccatggcactgagccttttcttcccatttgacaagtgaggaaactaaggtttagagaagataaatgatttacctgagattacacaggtattcagtaggaaaactgaaaataatgcttgttggttgtcaccatgctccgtatctctctccctataaaacaaaaactaagtgtggctaccattcctatttaggagtagccatgtttcttcattcaccaccaaaatctcattgattcaacaaatagagttgatacatatgacactatattagggatttagcagaaaaaatacaaatagcccaagctgttcctcacagagtgtacattaggtagattcaataattaagaatgtttttctctttctttgggaagccattaaacctattgccagccaagtgttttgaaatgaagtccagtgtgttgtatgtgagttaccctggtctctgtaacaacctgcaatgaagaggtgaaggctgtgtgttagttcatttgcattgctgtaaaggaatacctgaggctggataacataaagaaaagaggtttattttagctcatggttctgcaggctgtgtaggaagcatgtgccagcatctgcatctggtgagggcctcaggaggcttccaatcatggtggaaagcaaagggggagcaggcacattgcatggcgagagaggaagcaagagaaagaagcagaggagccaggctgtttttaaacaaccagatgtcacttgaattcatagattgagaactcactcattattgcaaggacagtaccaagccattcatgaaggccccatcctgcccccatgacccaaacacctctcacccagccccaccaccaacgttggggattatattcattcaacatgagatttggagggggacacatcgaaaccatatcaggctgtatacttggagccctgcaaccacacagcatcccatgaacatgacccaaaatgggaagcaatcaagggccgcttgtgaaaccagctttttctatgacccagaaggcactgcctcacctcatatgatcgaattatagacatcatcgtcgcagtaccataaatgagcagaaacgtcacttaaccaggtcccagctgatggggtgttaagaaaacagagttctcttctacccttgtctgggttggtcctactaaaaaactctcaagaccctaggcaatgtgattttcagattaactgagctagagcgttcattttaaagttaatgtttttttcttaatagttttcacagtgtacagacagaattaaagacctggagaaacagttcgtaaagcctgatggtgagaatagagctcgcttccttccagggaaagatctgaccgaaaaagaaatgatccaaaaattagacaaggtaaacattattgcttaaaattgcatctgttagctcctcgttgatgtagtttcacagatacctatggtactgtttcatgttatgctgacagacctatccttcattattctagtcactaatatagtccttttgttgtaatctagtcatacattctaagcttgatttagacacttgccaaaagaagttccaatccagtggtttcgagattccaaaggcacatttctctcatgacccaaaggagtaattttggcatcttaaatggattaatttgtcttcctgatgggagcacatcagaagaatggtgatgtggatgttagatagagctgagggggccatactcgaactcccagaggtatctgcaggggctggggcagggaaagtcttaacccagctctaaacactttccagaggtattttgtggggggtagggggagatactgctctaattaggaaataagattttgtcttagatgactttttttttattcctcttgaaccaattttcaaacatagctggaactacaactggccaagaaggaggagaagctgctggagaaggatttcatctatgagcaggtctccaggctcacagacaggctctgcagcaaaactcagggctgcaagcaggacacactgctcttagccaagaaggtaggcctgagaccctgccttttcccttctgcccctgctcctttattaccttttattttccacagaccgacagatttattgagagaagcactggagagattaggctttatgactaggggaacttagaaaaacgaaaggatgactcagagaattgtccaaaatgtttcaatcttattccctgaattaattcacttcacggtggcaaaacctaggcttttaaatgacactatacaagtttcacttaccaaggcaactacccaaatatgacagttattatctttgtatttcatgcacaaagttaaatcctttttagttccttttaagtggagcgcctcacttatccagtgatcttagtagggactgctccaatccagaactcagccagaacccagaaattgaaagggactgataaagagaaatgcagtcacacaacacccagaccaactgcaccatggaggtgcccaccaggcaccactagtgaggaaaggccaggaatacagaaccccctaatttaataagcgtaagagaccaggacagcagatccagagcctcagggtcagggtgggactgctagaagctgcactgaaaggagcagccagcagagcccctagaagtccccctggactcccagcatgttgcatgctagttaccctggtctctgtaacaacctgcaatgaagaggtgaaggctgtctattagttcgtttgcattgctgtaaaggaatacctgaggctgggtaactgataaagaaaagaggtttattttggctcatggttctgcaggctgtgcaggaagcatggtgcctgcaggtcttgccaggcttcctgtggctctgactcctgcttccaacaaaggttcatttggggaattgccccatcagcctgtacacccatttctgggtcatgtccgtgcaggcacgggactcactccttcctcagtctacccctacacaagaccattcatgcgaggcctttcatgcataccatagagccatcagaggactggccactcacctggcctctgggttccctggagcatcccgtcaatgcagagagttcagccagtcaacagtaattactgaacacctgctatgtgctactctcatgctaggcatgagttcagaaacaaagaggaagggacacattgtttacaccataggaagctcatagggtctagtagggggagacagatgaaaacagataatggtaatacccacaccagagactgtgggctcctgagggcagcagctgttcctcgttcttaatttctccaatgcctagcatgtgccagactctagaaaaacacttcaaggatgagtaatcatcagttctgttctagaagcacatgtggaacactaaacaagaaatgattgtaaatattagactatctttgccatttttatttgactattatgcttctgctctgatgacttccatgactagactgatcaggccagtggcaggtgtgcaaatcacaacttggcctcccaaactaaggtacaaagttgtgagtcacacgtctgccactggactgatgcgaaggctcagttaagctcatgcactttgcctgaattagcatgtctgatatttctttaaataaacgttgccttccttccttttgcaaaatgaatttccctttctttgggggaagtcatttttcactgaggcctgacttatcaaagctgatggcagagtcgcctggaaggcaacagtaatgctaaagaaatgtacatagcggccgcttcccatagccaggaaagctccagcacagccgagtcctagtctaacaattattctcccctttcctttccctaccttccatgctctccattggcttcttcctcctccccagctttcactgtccccactccatttaaaatgataatctcatagtaggcagaactggaaagtagaaagacattcagattccagatctatgatttatcaaaagtagaaaatgaccttgagaaagatggataaatgatcttaaaactcagtttgctcatctgtgtaatgggtgtgatagccaaagttgttgcaagtattacatagtcgaacacgtaagtgacctagccacattcaaaaagattgcacatctcctcaagtgtctcacttctcctagatagcttatggcgcctcctgcaaatttcccaacagaaatgggagcagaaagtgggaaatctcagttaagacttggagcaacccaggataatatgaaactttgttttctaatttatggaagagaagggaagttggccagttacacagatggacacacacactcgagtgtgtagtggttgccatcccattactgggtatatacccaaaggattataaatcatgctgctataaagacacatgcacacgtatgtttattgccacactattcacaatagcaaagacttggaaccaacccaaatgtccatcaatgatagactggattaagcaaatgtggtacatatacaccatggaatactatgcagccaaaaaaaggatgagttcatgtcctttgtagggacatggatgaagctggaaaccatcattctcagcaaactatcacaaggacaaaaaaccaaacactgcatgttctcactcatagatgggaactgaacaatgagaacacatggacacatgaaggggaacaccggggcctgtcatggggtggggggagggatagcattaggagatatacctaatgtaaatgatgagttaatgggtgcagcacaccaacatggcacatgtatacatatgtaacaaatctgcacgttgtgcacatgtaccctagaacttaaagtataattttaaaaaacagatgagaaaaaagaagaaaaaaaaagtgtgccgtggttgagtggaaaatgactccccccaaagataaggaaattcatttaaaaaaggaaaggcagcaacatttaaagaaacataagacatgctaatttactcaaagtgcattagcttatctaagtcttagcatttcttattttatgagttaaaagttgtgaattgcaccaatgctgctggactgttcagtctgttagtggaagttgtcaaagcagaagcctagaagtcaaataaaaatggcaaaacttatgactcactgaagtttttagtggtagtcatttttatttgatacatgctgcttaaaaattagttcagtatagaagagtcataaaaatgtatattacctaccattaaggaggcaaaatttgtgtataataatcagttattacattttcagaggcaggtaaatcactagcagcaacatttttctaaacagaggtacagatgtgaccagatatgctctgttaggagaggaaggtattcagcattagtgtagtatttggaagctcatttgcatgtcccaatttatcctggtccaagaacaaagaatgaaacaaactaagagttcattcattccttcattcagaaaatattgaactttaatttgggggggtgcctcttatattccaagcactgtcctgagcactgggactatgatgatgaataaaacaaaaagtccttgtcctcatgaagagtacattcttatgggatgacaaaaatagtgaaatacatatataatatcagcagtgagacatgatgtgaacaaaaaataaggcaaggtaagaggaactaatgagtgttgccaggtagaaggtatcaccactgaactgctccactatggctatcagactaaaagagtctaccatttataagacagcttacaggaacccctaattccagttttacttctttcctgactcttgagatcttttttttccagttagtcttatcttttaactgtgttaatgctaaatagctgatattaataggttaaaaaaaaaaaaagtctggtcgcagtggctcatgcctgtaatcccagcactttgggaggccatggcgggtagattgcgtgagctcaggagttcaagacctgcctaggcaacatggtgagactccatctctacaaaaaatacaaaaacaaatagccgggtgtgatggtgcacacctgtggtcccagctacttgggaggctgaggtgggaggatcacttgagcctcaggggcagaggttgcagtgagctgagatcacaccactgtgctccagcctgagtgacagagtgagaccctgtctcaaaacaaacgaacaaaacaaaacactccaggaacagctctcattctaaattattgactaaatattccccagctcagctcatgcatgtttctgacctagtaatgatgcacaccaggaattatgatcaataatgccaacatgtcaatgtgatggttttcatttaaaaagtcatttcagatgcagaacttctgctgattatcttatataagcaaagagtaacgttaattctaccagattttttcccctggataagtgacaaactaataacgtcaaattaaactagaatttaggcatcaagaacactcttggctgggcacagtggatcatgcctgtaatcccagcactttgggaggccgaggcaggaagactgcttgagcccaggagttcaaaactagccttgtcaacacagcaagtccccatcgctacaaaaataataaattagccaactatggtggtgcatggctatagtcctatctacttaggaggctgaggcaggagaattgcttgagccccggagttccaggctgcagtaagctatgatcacactactatataccagtgtgagcaacagaacaagaccttgtctttattttaatttttttttttttttttttaaagaacatccctggccaggcgcggtggctcacgcctgtaatcccagcacttagggaggctgaggcaggcggatcacgaggtcaggagatcaagaccatcctggctaacacggtgaaaccccagcgctaataaaaatacaaaaaaaattagccgggtatggtgttgggcacttgtagtcccagctactcgggaggctgaggcaggagaatggcgtgaacctgggaggcggagcttgcaatgagctgagattgcgctactgcactccagccagggcgacagagcgagactcagtctcaaaaaaaaaaaaaaaaaaagaacatcccttcacctctccttcttacctcttaaaaatgggcactaaactgttctcctcaatgttattcaccttgaaatccagtaactagataaacaaatccttttcttgttctctccttgtccttacttacacagccagggtgttcggctcaatatctgcagtctcttccagttcttaatttctgtgaattccaagttagaccctccttccttcagacaaaaatgcaccccgccattatagacagccagcagcctgccattttaagtctttgtggactgtatacatagactaagctttgggctctttaattctagatgaatggctatcaaagaaggatcaaaaatgcaactgagaaaatgatggctcttgttgctgagctgtccatgaaacaagccctaaccattgaactccaaaaggaagtcagggagaaagaagacttcatcttcacttgcaattccaggatagaaaaaggtctgccactcaataaggaaattgagaaagaatggttgaaagtccttcgagatgaagaaatgcacgccttggccatcgctgaaaagtctcaggtaggctttggctcctgtattgcatttctaaagggtgccagcaggggttgcattcaggcaacccacagttatcccacagtataagaaaaatttccccactctaccacacacagtcccaacagtcgttagaagtgtatttaagatattctatgataagtcaaagtgcagtaatccagagtgctacaatactcactgaagaacacttagcaagcacagggcccaccccatagccttacatcctgggctgctgaggctgaacatcatggccttccaccagcatagcaatgaccaggctggcactggccttgtccataagtctccaatctctgtcttggcacctctgctcagaccacatctgactgttccatgttcatctcctgtggcctccacagcatacagtgaggcctccacccacattttaggtgccatgccttctgcagatgcttgatgtacatcataggccccagcgccacccctttcttttcccaccttaggcctctggcctaagactaggtctattgctgactccccctgcaagttagatagcagatcttctgtctacccccatgacctgtcagtattcttagactggaattaggcatctctttccaaggagtctacatcctccagatgtacaactcactcagattgccaagtgggtatcaccgaaagggtccctatttgctcctgaactcaagacaaaactgcattcagaacacactaggaatacctgagcacaagtgtaaattacgtgatttataatttccacaccacctgggactgttcctttcagggcattcagattttacctgtggtgtcccactgccatttattagagggcttttcagtgcagtaagtgattactctattttccagaggcacagacaaaatcttgaaaacgttgaggctcagggcaaagctggtgaccattttcctcctctggttccactttactcctctacctcttccattgtaacttttgctcaccaatgacttaccaaaggaaatatgttgctctgcctttgtcaaaaacagggaaataattagtgcttgatgacagatattgaggtggaaacatagttaagacccacaaagcagtctttgaaaaacactaaactccaggattaatgtgatgcttaagcaatacagcccattccaatgaggtgtgggggtgtgtgtgtgtggtgtgattccaccctcctaccctaaaccccaggaataatgtgatgctgaagcaatacagcccatgccaatgagaggtaggtgtgtgtgtgtgtgtgtgtgtgtgtgtgtgtgtgtgtgtggtgtgattctaccctcctacccctcccatccctttggggagtatcagctagcacggtcaaagactgtccagaccagctgtgtcttttgggacctaaggataaagtgacttcaccagagttttcagagaactgaaaaggaaaaatcattctttgcaggagttcttggaagcagataatcgccagctgcccaatggtgtttacacaactgcagagcagcgtccgaatgcctacatcccagaagcagatgccactcttcctttgccaaaaccttatggtgctttggctccttttaaacccagtgaacctggagccaatatgaggcacataaggaaacctgttataaagccagttgaaatctgaatatgtgaacaaatccaggcctctcaaggaaaagacttcaaccaggcttccttgtacccacaggtgaaaaatgtgagcataatacttctaatattattgataagtaaggtaaccacaattagtcagcaacagagtacaacagggtttctatttacccaccaactactatacctttcatgacgttgaatgggacatagaactgtcctacatttatgtcaaagtatatatttgaatcgcttatattttctttttcactctttatattgagtacattccagaaatttgtagtaggcaaggtgctataaaaatgcactaaaaataaatctgttctcaatgaagtacggaaatggacacagtggtctttgtttattaaagaaaaaacaaatactgttcaatatacacactttaaaaagaaagaatggctatttgaaaaggaaaatacctcaagtattgcaaaggcataactcactttgttgaataagaagtagcacttaatcttggtaaatctaaattacataaagtagtgaagcttgtcatggctttttgcatttttttcattttatttttttgacaaataataattgtacctactcatggggtacatactgaagtttcaatacatataatgtatagtgatcagatcagggtaattagcatatacattcaaactttatcatttcattgtgttgggaatattcaatatcctcctagctatttgaaactgtatattgttacctatagtcatcctacagtggtataggacataggacttattccacctatttcactgtaattttgtgtctattaacaaatctaccccattccttcctttcctcatcctttcccttaaccttcccagcctcttatatccgctgttctacttttagcttccacatgagtgagaacaatttttagcttccacacatgagtgagaacatgtggtgtttaactttctgtacctggcttatttcaatgaacataacatcctccagttcctttcatgttgccacaaatgacaggattttgttcttttttgtggctaaataatattccgttgtgtatgtgcatatgtatgtgcatatgtgtgtgtgtgtgtgtagctcccattttctttatccacttatctgttgttggacagacacctaggctgatttcatgtcttgcctattgtgaatagcactgcagtaaacatgggggtgcagatgtctcttcaatattctgatttcctttcctctggataaatttccagtagggagattgttggatcatatgttcgttctatttgtagttttctgaggaacttccatatcattcttcatagtgactgcactagtttacattctcaccaacagtgtatataagagctcccttttctctgcatccttaccagcatttgttattttttaactttttggtaatagctattgtaattggggtgggatgatacctcatcatgtttttttaattgctatttccctgatgattagtgatgttgagcatttcttcatatacctgttggccatttgtatgtcttttgagaaatgtctgttcagatcatttgcccatttttaagtcagattgttgtttttgtagtgttttttgatgttaagatatttgagtcccttatttattctgaatatgaatcccctattggatgagtagtgtgcaactattttctttgattctgtaggttgtcttcactctgttgtttcctttgctgtgcagaaggtttttagtttgatgtaatctcatttgtttatttttgcttttgttgcctgtgttttgaggtcttattcataaaatattttctcaggccaatgtcctgaagcatttctcctatgttttcttccagtagttttatggtttggggtgctatatttaggtctttgatcattttgagttgatttttaaatagggtgagtagtagggaactagtttcattcttctgcatatggacctccagtttccccaacaccatttattgtagagactgtccttttcccaataagtattcttggaacctttgtcaaaaatcagttgtctatagatatatggatgaatttcttgattctctattttgttccattggtctatgtatctgtttttatcccagtgtcatgctgttttggttactagagctttgtagtatatttaagatgtggtagtgtgatacctccagctttgttcattttgttcaggattgctttggctatttggggtcttttgtggttacatacaaattttaagattgttttttcctatttttctgaagaatgccattagtattttgatagtgactacaatcaatctgttgattgctttgggtagtattgtcattttgttttgttttatctattttattttattttattttatttattttgggagacagagtctcactctatcacccaggctggagtgcagtgacatgatctcagctcactgcagcctccacctccagggctcaagtgatcctcccacctcagcctcctgagtagctgggactacaggtacacaccaccacacccagctaatatttttattttttgtagagatggagtctcactaggtgacctaggctgctctcaaactcctggcctcacgcaatcctcctgcctcagcctccaaaaagtgctaggattataagtatgagccaccacatccagccagaatggctattattaaaaagtcacacacacaataaagatgttggtaaggttgcaggaaaaagggaatgcttaacactgctggtgggaatgtaaaattagttcaaccactttggaaagaactaaaaacagaactaccatttaacccagcaatcccattactgggtatatacccaaggaaaataaattgttctaccaaaaggacatgtgcacttgtacattcatcaaagcactattcacaatagcaaagacatggaatcaacctagatgcccattaacactggactggataaagaaaatgtgatacatatacaccatggaatacagccataaaaaggaacaaaatcacattctttgcagcaacatggatgcagttggaggccactgacctaagcaagtctgaagcagaaaaccaaatactacatgttctcacttaaatgggggagctaaacaatgagtacacatggatataaagatggaaacgacagactattggggagaaggtggggggagagttgaaaaactatctgttgggtactatgcccactacctggatgatgggatcatttgtacctcaaacttcagcattacatgatttacccatgtaagaaaaaatcttctttaaaggttcagtagaattcagcaatgatgccatctggatttttctttgttggaagactattttattttatatattttattttattaatttattgttttgagacagagtctcgctctgtcacccagactgtagtgcagtggccaaatcttggcttactgtaacctctgcctcccaggttcaagtgattctcctgcctcagcctcccaagtagctgggattataagcatgcactaccatgcctggctaatttttggaatttttagtagagatggggttttgccaggctggtctcaaactcctggccctgagtgatccacctgccttggcctcccaaggtgctgggattacaggtgtggaagacgttttattactcatttaatctaattgcttggtattgatctgttcaggttttctatttcttcccaattcaaccttggtagattgtatatgtcaaggagtttattcacttcctctaggttttctaacttgacatatagtacaaagcaccctggaattattttttgtatctgttgtgacatacccttttttgcttctgatttcatttatttgggtcttctctcttttttccttagtctagctaatggtttgttgaatgtgtttattctttcagaaaaccaactttttgttttgttgatcttttgtatttttttactctcaatttcatttatttctgctctaatctttattatttctctcttcctacaattttgactttgatttgttcttgattttctagttgcttgaggtatatcattaggttatttgaaatctttctagttttttcatgttaagtatttgttgctataaacttgcttctcactactgcttttgctgtgtcccatacgttttggcatgttgtgtttccattttcgtttgttccaaagaatttttaaatttcttccttaatttctttcttcttcattttggtcattcaggagcatgttgtttaatttccatgtatttgtatagtttcaaatgttctcattatttatgtctagttttattccattatggtcagatatttgatatgattttgatttaaaaaataaatttggatgccaggcaaggtggctcacacctataatcccagcactttgggaggccgaggcaggcggatcacttgaggtcaggagtttgagacaagcctggccaacatggtgaaacccggtctctactaaaaatatgaaaattagctggccatggtggcgcatgcctgtagtttcagctacttgggaggttgaggcaggagaatggcttgaacccaggtgacagaggttgcagtgagccaagatcgcaccgttgcacttcagcctgggcaacagagtgagactccatctcaaaaaagtgtcttcatctcaaaaaaagtctctttttgagacttgttttatttctaacctatggtcagtcctgaagaatgtttcatgtgctgatgaaaagaatgtgtatcctgtatttcacctgttgggtgaaatgttctgtaaatgtctgttaggtccatttggtccatgatatggtttaaatccagtttttctttgttgattttctatatagattatctgttcagcactgagaatgaggtgttgaaatctccaactattattgtattggggtctatcactccttttagctcttaatattttctttatatatctgagtgctctggtggtgggtgcatatatatttataattgttctattgctgaattgatccctttattagtatataatggtcttctctgtctctttttacagcttttgacttgaagtttgtcttgtctcatataagtatagctactcctgctcacttttggttttcatgtgcttgaaatatctttttctatcccttcactttcagtctatgtgtgtctttacaagtgaggtgagtttcttgtaggcagcatatagttaggtgttggtttgctttaatccaattagccacttgatatattttatttttttaattataagtttatttaatttttccgtaagttattggggtacaaatggtatttggttacaggaataagttctttagtggtgatttgtgagatcctggtgcacccatcatccaagcagtatacactgcaccatatatgttttcttttatccctcgccccctcccactcttccccccaagtcacctaagtccattgtatcattcttatgcctttgcgtcctcatagcttagttcccacacatcattgagaacatatgatgtttgggtttccattcctgagttactttacttagaataatagtctccagtctcatctaggtcattgcaaatgctattaattcattcccttttatggctgagtagtattccatttgtgtgtgtgtgtatgtgtgtgtgtgtgtgtgtatagatagatatatagatatagatcacagtttctttatccactcattgattgatgggcatttgggttagttccattattttgccattgtgaattatgctgctataaacatgcatgtgcaagtatctttttcgaataatgactttgtttcctctacgtagatacccagaagtgggattgttggatcaaatggtagttctacttttagttctttaaggaatctccacactgttttccatagtggttgtactagtttacattcccaccagcagtgtaggtgggattccctgatcgccaaatccatgccagcatctactgcttttttatttttttgattatggccattctttcaggagtaaggtggtatcacattgtggttttgatttggatttccctgatcattagtgatgctgagcattttttcatatgtttgttggccatttgtatatcttcttttgagaattgtctgtttgtggccttagcccgctttttgatgggattgtttttttcttactgatttttttgattttgttgtagattctggttattagtcctttgtcagatgtatagattgtgaagattttctcccactctgtgggttgtctgtttactctgctgactgttccttttgcatgcaaaagctctttagtttaattaggtcccagctatttatctttgtttttattgcatttttcttttggggttttggtcatgaaatccttgcctaagccaatgtctagaagggtttttccaatgttatgttttagaatttttatagtttcaggtcttaggtttaagtccttaacccaccttgagttgatttttgtaaaaggtgagaaatgaggatccacttttattctcctacatgtggctagccaattatcccagcaccatttgttgaaaagggtgccctttcctcactttatgtttttgtttgctttgtcaaagatcagttggctgtaagtatttgggtttatttctgtgttctctgttctgttctattggtctatgtgcctatttttatgccagtaccatggtgttttggtgactatggccttagagtatagtttgaaatcaggttatatgatgccttcagatttgcactttttgcttagtcttgctttggctatgcgggctcttttttggttccatgtgaattttagaattgttttttctaactctgtgaagaatgatggtggttttttgatggggattgcattgaatttgtggattgcttttggcagtatggtcattttcacaatattgattctacccatccatgagcatgggatttgtttccatttgtattgtctatgatttctttcagcagtgctttgtagttttccttgtagaggtctttcaactcctttgttaggtatattcctaagttttttttttttttgcagctattataaaagggattgagttctcaatttgattctcagcttggttgctgttggtgtatagaagagctactgatttgtggacattaatcttgtatctggaaactttgctgaattattttatcagttctaggagatttctggaggagtctttagggttttcaaggtaaacaatcatattgttagcaaacactgacagtatgacttcctctttaccaatttggataccctttatttcttttgtctgattgctctggctaggacttccagtactatgttgaagaggagtggtgagagtgggcattcttgtcttgttccagttctcagagggaatgctttcaacttttccccattcagtattatgttggctgtgggtttgtcatagatggcttttattacattaaggtacgtcccttgtatgccgattttgctaaggattttaatcataaagcgatgctggattttgtcaaatgcttttctgcacctgttgagatgatcgtgtaatattttttttaattctgtttatgtggtatatcacatttcctggcttgcatatgttaaaccatccctgcaaccctcgtatgaaacctacttgattatggtggattttctttttgatatcttgtggatttggttagccagtattttgttaaggattttagcatctacgttcatcaaggatatcggtctgtagttttttttttttttttttggttgtgtcctttcctggttttggtattagggtgatgctggcttcatagaatgaattagggagagttctttctttctctatcctatggaatagtgtcaaaaggattggtaccaattcttctctgaatgtctggtagaattctgctgtgaatccatctggtactggacttttttgtgtgggtaattttttttttgacagagtttcactctgttgcccaggctggagtgcagtggcgtgatctcagctcactgcaacttccgcctcctgggttcaagcagctctcctgcctgagcttccagagtagctgggactacaggcatgtgccaccacactctgttaatttttgtatatttagtagagacagggttttgccacattggccaggctggtctcgaactcctgacctcaagtgatccacccgcctcggcctcccaaagcgctgggtttacaggcatgagccaccatgcccggccttttgttggtaattttttaattaccgtttccatctcgctggttgttattggtctgttcagggtgtctaattcttcctgatttaagctaagaaggttgtatttttccaagagtttatccatctcttctatgttttctagtttatgtgcgtaaaggtgttcttattagccttgaatgatcttttgtatttcagtggcgtcagttgtaatatctcctgtttcgtttctctgtgtgaggttatttggattttctctcttcttttcttggttaatcttgctaatggcctatcaattttatttaccttttcaaagaaacagctttttgtttcatttatcttttgtatttttgtttgtttcaattttatttagttctgctctgatctttgttatttcctttcttctgctgggtttgggtttggcttgttcttgtttctctagatctttgaggtgtgaacttagattgtctgtgctctttcggactttttgatgtaggcatttagggccatgaactttcctcttactacatgttaagtgtatcccagaggctttgataggttgtgtcatttattgtcattcagttcgaagaattttttattttccatcttgatttcgtttttgacccaatgctcattcaggagcaggttatttaatttccatgtatttgcatggttttgaaggatccttttggaattgatttccagttttattccactgtggtctaagagaatgcttgatataacttcaattttcttacatttattgagcctcgttttatggcctatcatatggtctgtcttggagaaagttccaggcactattgaatagaatgtgtattctgtggctgttagatgaaatgttctgtatatatctgttaagtccatttgttccagggtatagttaaaatcctttgtttctttgttgactttctgtcttgatgacataagtgctgtcagtggagtactcaaagtcccccactattacagtgtttttgtctatctcatttcttaggcctattagtaattgttttataaatttgggagctccagtattaggtgcatatatgtttaggaagtggagcatttaggccatttacattcaatgttagtattgaaatgtgaggtaccattgcattcatcatgctctttgttgcctgtgtacttttgggacttttttgttttgttttttaactcgtatttttgttttataggtcttgtgtgatttatgctttaatgagattctgttctgatgtgtttccaggatttgtttcaagatttagagctccttttagcagttcttgtagtggtggcttggtaatggcgaatttgatcagcatttgtttgtcagaaaatgtctttccttcatatatgatgcttaggtttgctggataccaaattcttggctgatacttgttttgcttgaggaggttgaagataaagacccccaatcccttctagcctgtggggtttctgctgagaagtctgctgttaaatctgataggttttcctttctaggttacctggtgcttctctctcactgtagcatgacgagccatagacaaaacctctcagacaccaagttgtagaaagaagggctttattcagctgggagcatcggcaagctactgccttaaaatccgagctccctgaatgcacaatttctgtcccttttaagggctcacaacactaaagatttcacatgaaagggtcgtgattgatttgagcaagcagatggtacgtgacaggggctgcatgcaccggtggtcagagagaaacagaacagggcagggagtttcacagtgttcttctatacaatgtctggaatctatgaataacatcggtttctaagttatgagttgatttttaactactgggtttaggccaggcaggcccgggcctggttttgggcctggcgccggactgcctgtctttggttttactcccttgttgttttttcttaaaacaggtactgagtataaaacaatataaaacaatatgagagggtctctctcttccctcatcacagctcttaagattctttcctttgtcttaactttggataacctgatgacaatgtgcctaggcaaagatctttttgcg

SEQ ID NO: 946 - DNA, 2988 bp, Homo sapiens
ttacatgctatgggaaaacttcctggaaccagaatggcagcgttaaaagccaagtataccttgctgcatgacgccgtgatgagcacacaagagtcagaggtccaactgctacagaatgccaaacgtttcactgagcaaatacaacagcagcagtttcacctgcagcaagctgataattttccagaagcattctccacggaggtctccaaaatgagagaacaacttctcaagtatcaaaatgaatataatgcagtgaaggaaagagagttccataatcagtacagattaaatagaacttgattttttttttttgcagcttaaaggaagaaaaaatcatcatagtaaaagaatttgagaagataacaaagccaggagaaatggagaagaagatgaaaatattgagagaaagcactgaagaattacgtaaagaaataatgcagaagaaattagaaattaaaaatttacgagaagatttggcatctaaacaaaagcagttattaaaagagcagaaggaactagaagaattgttgggacatcaggtcgtcctaaaggatgaagtggcccaccatcaaaccattccagtacaaattggaaaagagatagaaaaaataacacgcaaaaaagtagaaatggaaaagaaaaaaattgtcttggaacaagaagtcaaaacgctaaatgactccctaaagaaagttgaaaacaaggttagtgctatagtggatgagaaggaaaatgtaataaaggaagttgaaggcaaacgagccttacttgaaatcaaagaacgagaacataaccaattggtcaagctattggaattagccagagagaatgaagcaacttcattaactgaaagagggatcttggatctcaatttacgcaacagtctcattgacaagcagaactaccatgatgaactttctcgtaagcaaagagagaaagaacgagattttcgaaatttaagaaagatggaactgctcttgaaagtgtcctgggatgcacttaggcaaactcaagcactgcatcaaaggcttctattagagaaaattatatcagaaatggagtctaagttagtagaacaacaacttgcagaagaaaacaagcttttaaaggagcaagaaaacatgaaagagctagtagtcaaccttctccgcatgactcaaatcaaaattgatgaaaaggaacaaaagtccaaggatttcctgaaagctcagcaaaaatacaccaacattgttaaagaaatgaaagcaaaggatcttgaaatcaggatacacaagaagaaaaaatgtgaaatttatcggagactgagagagtttgctaaactgtatgacaccattcgaaatgaaagaaacaaatttgttaacttactccacaaagctcatcagaaagtaaatgaaataaaagaaaggcataaaatgtcattaaatgaacttgaaattctgagaaatagtgccgttagtcaagaaagaaagctacaaaattccatgctgaaacacgccaacaatgttaccatcagagagagcatgcaaaacgatgtgcgcaaaattgtatcaaaacttcaggaaatgaaagaaaagaaggaagcccagttaaataacattgacagacttgccaacacgatcacaatgatcgaagaggagatggtgcagcttcgcaaaagatacgaaaaagctgttcagcatcgaaatgaaagtggcgttcagctgatagagcgggaagaagaaatatgcattttttatgaaaaaataaatatccaagagaagatgaaactaaatggagaaattgaaatacatctactggaagaaaagatccaattcctgaaaatgaagattgctgagaagcaaagacaaatttgtgtgacccagaaattactgccagccaagaggtccctggatgccgacctagctgtgctccaaattcagttttcacagtgtacagacagaattaaagacctggagaaacagttcgtaaagcctgatggtgagaatagagctcgcttccttccagggaaagatctgaccgaaaaagaaatgatccaaaaattagacaagctggaactacaactggccaagaaggaggagaagctgctggagaaggatttcatctatgagcaggtctccaggctcacagacaggctctgcagcaaaactcagggctgcaagcaggacacactgctcttagccaagaagatgaatggctatcaaagaaggatcaaaaatgcaactgagaaaatgatggctcttgttgctgagctgtccatgaaacaagccctaaccattgaactccaaaaggaagtcagggagaaagaagacttcatcttcacttgcaattccaggatagaaaaaggtctgccactcaataaggaaattgagaaagaatggttgaaagtccttcgagatgaagaaatgcacgccttggccatcgctgaaaagtctcaggagttcttggaagcagataatcgccagctgcccaatggtgtttacacaactgcagagcagcgtccgaatgcctacatcccagaagcagatgccactcttcctttgccaaaaccttatggtgctttggctccttttaaacccagtgaacctggagccaatatgaggcacataaggaaacctgttataaagccagttgaaatctgaatatgtgaacaaatccaggcctctcaaggaaaagacttcaaccaggcttccttgtacccacaggtgaaaaatgtgagcataatacttctaatattattgataagtaaggtaaccacaattagtcagcaacagagtacaacagggtttctatttacccaccaactactatacctttcatgacgttgaatgggacatagaactgtcctacatttatgtcaaagtatatatttgaatcgcttatattttctttttcactctttatattgagtacattccagaaatttgtagtaggcaaggtgctataaaaatgcactaaaaataaatctgttctcaatgaagtacggaaatg

SEQ ID NO: 947 - protein, 749 aa, Homo sapiens
MEKKMKILRESTEELRKEIMQKKLEIKNLREDLASKQKQLLKEQKELEELLGHQVVLKDEVAHHQTIPVQIGKEIEKITRKKVEMEKKKIVLEQEVKTLNDSLKKVENKVSAIVDEKENVIKEVEGKRALLEIKEREHNQLVKLLELARENEATSLTERGILDLNLRNSLIDKQNYHDELSRKQREKERDFRNLRKMELLLKVSWDALRQTQALHQRLLLEKIISEMESKLVEQQLAEENKLLKEQENMKELVVNLLRMTQIKIDEKEQKSKDFLKAQQKYTNIVKEMKAKDLEIRIHKKKKCEIYRRLREFAKLYDTIRNERNKFVNLLHKAHQKVNEIKERHKMSLNELEILRNSAVSQERKLQNSMLKHANNVTIRESMQNDVRKIVSKLQEMKEKKEAQLNNIDRLANTITMIEEEMVQLRKRYEKAVQHRNESGVQLIEREEEICIFYEKINIQEKMKLNGEIEIHLLEEKIQFLKMKIAEKQRQICVTQKLLPAKRSLDADLAVLQIQFSQCTDRIKDLEKQFVKPDGENRARFLPGKDLTEKEMIQKLDKLELQLAKKEEKLLEKDFIYEQVSRLTDRLCSKTQGCKQDTLLLAKKMNGYQRRIKNATEKMMALVAELSMKQALTIELQKEVREKEDFIFTCNSRIEKGLPLNKEIEKEWLKVLRDEEMHAIAEKSQEFLEADNRQLPNGVYTTAEQRPNAYIPEADATLPLPKPYGAPFKPSEPGANMRHIRKPVIKPVEI

SEQ ID NO: 948 - DNA, 23235 bp, Mus musculus
  misc_feature (1)...(23235): n = A,T,C or G
nnnnnnnnnnnnnnnnnnnnnnnnnnnnnnnnnnnnnnnnnnnnnnnnnnnnnnnnnnnnnnnnnnnnnnnnnnnnnnnnnnnnnnnnnnnnnnnnnnnnnnnnnnnnnnnnnnnnnnnnnnnnnnnnnnnnnnnnnnnnnnnnnnnnnnnnnnnnnnnnnnnnnnnnnnnnnnnnnnnnnnnnnnnnnnnnnnnnnnnnnnnnnnnnnnnnnnnnnnnnnnnnnnnnnnnnnnnnnnnnnnnnnnnnnnnnnnnnnnnnnnnnnnnnnnnnnnnnnnnnnnnnnnnnnnnnnnnnnnnnnnnnnnnnnnnnnnnnnnnnnnnnnnnnnnnnnnnnnnnnnnnnnnnnnnnnnnnnnnnnnnnnnnnnnnnnnnnnnnnnnnnnnnnnnnnnnnnnnnnnnnnnnnnnnnnnnnnnnnnnnnnnnnnnnnnnnnnnnnnnnnnnnnnnnnnnnnnnnnnnnnnnnnnnnnnnnnnnnnnnnnnnnnnnnnnnnnnnnnnnnnnnnnnnnnnnnnnnnnnnnnnnnnnnnnnnnnnnnnnnnnnnnnnnnnnnnnnnnnnnnnnnnnnnnnnnnnnnnnnnnnnnnnnnnnnnnnnnnnnnnnnnnnnnnnnnnnnnnnnnnnnnnnnnnnnnnnnnnnnnnnnnnnnnnnnnnnnnnnnnnnnnnnnnnnnnnnnnnnnnnnnnnnnnnnnnnnnnnnnnnnnnnnnnnnnnnnnnnnnnnnnnnnnnnnnnnnnnnnnnnnnnnnnnnnnnnnnnnnnnnnnnnnnnnnnnnnnnnnnnnnnnnnnnnnnnnnnnnnnnnnnnnnnnnnnnnnnnnnnnnnnnnnnnnnnnnnnnnnnnnnnnnnnnnnnnnnnnnnnnnnnnnnnnnnnnnnnnnnnnnnnnnnnnnnnnnnnnnnnnnnnnnnnnnnnnnnnnnnnnnnnnnnnnnnnnnnnnnnnnnnnnnnnnnnnnnnnnnnnnnnnnnnnnnnnnnnnnnnnnnnnnnnnnnnnnnnnnnnnnnnnnnnnnnnnnnnnnnnnnnnnnnnnnnnnnnnnnnnnnnnnnnnnnnnnnnnnnnnnnnnnnnnnnnnnnnnnnnnnnnnnnnnnnnnnnnnnnnnnnnnnnnnnnnnnnnnnnnnnnnnnnnnnnnnnnnnnnnnnnnnnnnnnnnnnnnnnnnnnnnnnnnnnnnnnnnnnnnnnnnnnnnnnnnnnnnnnnnnnnnnnnnnnnnnnnnnnnnnnnnnnnnnnnnnnnnnnnncccggatgtgtctttctctccttcttctagtcttttggctcgattaaaagctctcgaaatagtaagaaaagaggtctgggaacagctaaaagaaacctatgttgctggtgacacacaggtgcagcaccagtttgaagtaggagacacagtcctggtgaggagacaccgagcaggaaacctagagccgaggtggaagggaccctacttggtgctactgacaacgcccaccgcggtcaaagtggaagcaatccccacttgggtccacgcatcccatgtcaagagagcaccccctggagtcagccatgatgagtggactttggagaagactactaatccttttgagttgcgcctgcttcgtaggagcgatcccaaaggacttcaacccccacagtcctgttcaacaaacgtgggaggtactcaatgaggggggtagggctgtatggacaatcgccaaggtacaccctctgtggacttggtggcctgatcttttccctgacatctgtaagttggcaataggagcccctcctagatgggacttagaggggtactctgacattcagagggcacctttaacaccccctccgtacatagaaaaacattcgagagaaccatggggtggttgctctaactaaagggatagaagtatgcttcgaacccatcccttctacgtcttccccgggccccatcgaagtcagtccctcaatccaacatgtgtaggtaaggctgacttcttttgtaagagctggggttgcgagacttcaggtacagcccgctggaagccctcctcgagctgggactatattagagtagcagccaactattccctagcgtcttatgtacctggaggatttgacctagacgagtgtactgactggtgccatccgctccgtgtcaccttcactgaaccagggaagagagctctgggatggacaaaagggtatacctggggtcttaggatttacaaggaaagatatgatgggggattattgttcactctccgattaaaaatagagaccccctacaatcctttaggccccccaaccaagtccacacccctcacccatactattactcagcctactccagtgattgcggacccccttaatatggccgctatcacccaacctcccactcctcaggtacctctaactattacccctgcaattccttcaacaagacagaggatgtttaacctagtaagaggagccttttatgcccttaatagaactgatccaagcgctactgaggactgctggctatgcctgtccttgggtctgccttattatgaaggaattgccttctatggggatttcaacagaaccagcagccatacttcctgctcttggggaacaggacaaaaactgaccctgactgaagtatctgcgaggagtccaggtctctgtataggcacccctccttccacccacaaacacctatgcggacaaattcagtccgtgtccagaatggaagctaattactatcttgtaccttccccggttggatggtgggcttgcaatacaggacttactccctgtgtatcaactaaggtttttaattcatctcatgatttttgtgtcatgatccagctgttaccccgcatatattatcaccctgcatccagtttagaagaaagctatgctggccggcggtcaaaaagagaaccaattactttaaccctggctgcattcatgggaataggtatggcagtaggagtggggacgggagtgtcagctttgatagaaggaagacagggaattcagtctttgagggatgctgtcaatgaagacctagcggcaatagagaagtccattgacgctttagaaaaatctttgacctccctgtctgaggtagttttgcagaacaggagagatcttgattttgttgttcctaaaggaaggaggactgtgtgctgcccttaaagaagagtgctgcttctatgcagatcatacaggaatagttagagactctatgcagaaactgagagaaagattagagcgaaggaaacgggaacgggatgnnnnnnnnnnnnnnnnnnnnnnnnnnnnnnnnnnnnnnnnnnnnnnnnnnnnnnnnnnnnnnnnnnnnnnnnnnnnnnnnnnnnnnnnnnnnnnnnnnnnnnnnnnnnnnnnnnnnnnnnnnnnnnnnnnnnnnnnnnnnnnnnnnnnnnnnnnnnnnnnnnnnnnnnnnnnnnnnnnnnnnnnnnnnnnnnnnnnnnnnnnnnnnnnnnnnnnnnnnnnnnnnnnnnnnnnnnnnnnnnnnnnnnnnnnnnnnnnnnnnnnnnnnnnnnnnnnnnnnnnnnnnnnnnnnnnnnnnnnnnnnnnnnnnnnnnnnnnnnnnnnnnnnnnnnnnnnnnnnnnnnnnnnnnnnnnnnnnnnnnnnnnnnnnnnnnnnnnnnnnnnnnnnnnnnnnnnnnnnnnnnnnnnnnnnnnnnnnnnnnnnnnnnnnnnnnnnnnnnnnnnnnnnnnnnnnnnnnnnnnnnnnnnnnnnnnnnnnnnnnnnnnnnnnnnnnnnnnnnnnnnnnnnnnnnnnnnnnnnnnnnnnnnnnnnnnnnnnnnnnnnnnnnnnnnnnnnnnnnnnnnnnnnnnnnnnnnnnnnnnnnnnnnnnnnnnnnnnnnnnnnnnnnnnnnnnnnnnnnnnnnnnnnnnnnnnnnnnnnnnnnnnnnnnnnnnnnnnnnnnnnnnnnnnnnnnnnnnnnnnnnnnnnnnnnnnnnnnnnnnnnnnnnnnnnnnnnnnnnnnnnnnnnnnnnnnnnnnnnnnnnnnnnnnnnnnnnnnnnnnnnnnnnnnnnnnnnnnnnnnnnnnnnnnnnnnnnnnnnnnnnnnnnnnnnnnnnnnnnnnnnnnnnnnnnnnnnnnnnnnnnnnnnnnnnnnnnnnnnnnnnnnnnnnnnnnnnnnnnnnnnnnnnnnnnnnnnnnnnnnnnnnnnnnnnnnnnnnnnnnnnnnnnnnnnnnnnnnnnnnnnnnnnnnnnnnnnnnnnnnnnnnnnnnnnnnnnnnnnnnnnnnnnnnnnnnnnnnnnnnnnnnnnnnnnnnnnnnnnnnnnnnnnnnnnnnnnnnnnnnnnnnnnnnnnnnnnnnnnnnnnnnnnnnnnnnnnnnnnnnnnnnnnnnnnnnnnnnnnnnnnnnnnnnnnnnnnnnnnnnnnnnnnnnnnnnnnnnnnnnnnnnnnnnnnnnnnnnnnnnnnnnnnnnnnnnnnnnnnnnnnnnnnnnnnnnnnnnnnnnnnnnnnnnnnnnnnnnnnnnnnnnnnnnnnnnnnnnnnnnnnnnnnnnnnnnnnnnnnnnnnnnnnnnnnnnnnnnnnnnnnnnnnnnnnnnnnnnnnnnnnnnnnnnnnnnnnnnnnnnnnnnnnnnnnnnnnnnnnnnnnnnnnnnnnnnnnnnnnnnnnnnnnnnnnnnnnnnnnnnnnnnnnnnnnnnnnnnnnnnnnnnnnnnnnnnnnnnnnnnnnnnnnnnnnnnnnnnnnnnnnnnnnnnnnnnnnnnnnnnnnnnnnnnnnnnnnnnnnnnnnnnnnnnnnnnnnnnnnnnnnnnnnnnnnnnnnnnnnnnnnnnnnnnnnnnnnnnnnnnnnnnnnnnnnnnnnnnnnnnnnnnnnnnnnnnnnnnnnnnnnnnnnnnnnnnnnnnnnnnnnnnnnnnnnnnnnnnnnnnnnnnnnnnnnnnnnnnnnnnnnnnnnnnnnnnnnnnnnnnnnnnnnnnnnnnnnnnnnnnnnnnnnnnnnnnnnnnnnnnnnnnnnnnnnnnnnnnnnnnnnnnnnnnnnnnnnnnnnnnnnnnnnnnnnnnnnnnnnnnnnnnnnnnnnnnnnnnnnnnnnnnnnnnnnnnnnnnnnnnnnnnnnnnnnnnnnnnnnnnnnnnnnnnnnnnnnnnnnnnnnnnnnnnnnnnnnnnnnnnnnnnnnnnnnnnnnnnnnnnnnnnnnnnnnnnnnnnnnnnnnnnnnnnnnnnnnnnnnnnnnnnnnnnnnnnnnnnnnnnnnnnnnnnnnnnnnnnnnnnnnnnnnnnnnnnnnnnnnnnnnnnnnnnnnnnnnnnnnnnnnnnnnnnnnnnnnnnnnnnnnnnnnnnnnnnnnnnnnnnnnnnnnnnnnnnnnnnnnnnnnnnnnnnnnnnnnnnnnnnnnnnnnnnnnnnnnnnnnnnnnnnnnnnnnnnnnnnnnnnnnnnnnnnnnnnnnnnnnnnnnnnnnnnnnnnnnnnnnnnnnnnnnnnnnnnnnnnnnnnnnnnnnnnnnnnnnnnnnnnnnnnnnnnnnnnnnnnnnnnnnnnnnnnnnnnnnnnnnnnnnnnnnnnnnnnnnnnnnnnnnnnnnnnnnnnnnnnnnnnnnnnnnnnnnnnnnnnnnnnnnnnnnnnnnnnnnnnnnnnnnnnnnnnnnnnnnnnnnnnnnnnnnnnnnnnnnnnnnnnnnnnnnnnnnnnnnnnnnnnnnnnnnnnnnnnnnnnnnnnnnnnnnnnnnnnnnnnnnnnnnnnnnnnnnnnnnnnnnnnnnnnnnnnnnnnnnnnnnnnnnnnnnnnnnnnnnnnnnnnnnnnnnnnnnnnnnnnnnnnnnnnnnnnnnnnnnnnnnnnnnnnnnnnnnnnnnnnnnnnnnnnnnnnnnnnnnnnnnnnnnnnnnnnnnnnnnnnnnnnnnnnnnnnnnnnnnnnnnnnnnnnnnnnnnnnnnnnnnnnnnnnnnnnnnnnnnnnnnnnnnnnnnnnnnnnnnnnnnnnnnnnnnnnnnnnnnnnnnnnnnnnnnnnnnnnnnnnnnnnnnnnnnnnnnnnnnnnnnnnnnnnnnnnnnnnnnnnnnnnnnnnnnnnnnnnnnnnnnnnnnnnnnnnnnnnnnnnnnnnnnnnnnnnnnnnnnnnnnnnnnnnnnnnnnnnnnnnnnnnnnnnnnnnnnnnnnnnnnnnnnnnnnnnnnnnnnnnnnnnnnnnnnnnnnnnnnnnnnnnnnnnnnnnnnnnnnnnnnnnnnnnnnnnnnnnnnnnnnnnnnnnnnnnnnnnnnnnnnnnnnnnnnnnnnnnnnnnnnnnnnnnnnnnnnnnnnnnnnnnnnnnnnnnnnnnnnnnnnnnnnnnnnnnnnnnnnnnnnnnnnnnnnnnnnnnnnnnnnnnnnnnnnnnnnnnnnnnnnnnnnnnnnnnnnnnnnnnnnnnnnnnnnnnnnnnnnnnnnnnnnnnnnnnnnnnnnnnnnnnnnnnnnnnnnnnnnnnnnnnnnnnnnnnnnnnnnnnnnnnnnnnnnnnnnnnnnnnnnnnnnnnnnnnnnnnnnnnnnnnnnnnnnnnnnnnnnnnnnnnnnnnnnnnnnnnnnnnnnnnnnnnnnnnnnnnnnnnnnnnnnnnnnnnnnnnnnnnnnnnnnnnnnnnnnnnnnnnnnnnnnnnnnnnnnnnnnnnnnnnnnnnnnnnnnnnnnnnnnnnnnnnnnnnnnnnnnnnnnnnnnnnnnnnnnnnnnnnnnnnnnnnnnnnnnnnnnnnnnnnnnnnnnnnnnnnnnnnnnnnnnnnnnnnnnnnnnnnnnnnnnnnnnnnnnnnnnnnnnnnnnnnnnnnnnnnnnnnnnnnnnnnnnnnnnnnnnnnnnnnnnnnnnnnnnnnnnnnnnnnnnnnnnnnnnnnnnnnnnnnnnnnnnnnnnnnnnnnnnnnnnnnnnnnnnnnnnnnnnnnnnnnnnnnnnnnnnnnnnnnnnnnnnnnnnnnnnnnnnnnnnnnnnnnnnnnnnnnnnnnnnnnnnnnnnnnnnnnnnnnnnnnnnnnnnnnnnnnnnnnnnnnnnnnnnnnnnnnnnnnnnnnnnnnnnnnnnnnnnnnnnnnnnnnnnnnnnnnnnnnnnnnnnnnnnnnnnnnnnnnnnnnnnnnnnnnnnnnnnnnnnnnnnnnnnnnnnnnnnnnnnnnnnnnnnnnnnnnnnnnnnnnnnnnnnnnnnnnnnnnnnnnnnnnnnnnnnnnnnnnnnnnnnnnnnnnnnnnnnnnnnnnnnnnnnnnnnnnnnnnnnnnnnnnnnnnnnnnnnnnnnnnnnnnnnnnnnnnnnnnnnnnnnnnnnnnnnnnnnnnnnnnnnnnnnnnnnnnnnnnnnnnnnnnnnnnnnnnnnnnnnnnnnnnnnnnnnnnnnnnnnnnnnnnnnnnnnnnnnnnnnnnnnnnnnnnnnnnnnnnnnnnnnnnnnnnnnnnnnnnnnnnnnnnnnnnnnnnnnnnnnnnnnnnnnnnnnnnnnnnnnnnnnnnnnnnnnnnnnnnnnnnnnnnnnnnnnnnnnnnnnnnnnnnnnnnnnnnnnnnnnnnnnnnnnnnnnnnnnnnnnnnnnnnnnnnnnnnnnnnnnnnnnnnnnnnnnnnnnnnnnnnnnnnnnnnnnnnnnnnnnnnnnnnnnnnnnnnnnnnnnnnnnnnnnnnnnnnnnnnnnnnnnnnnnnnnnnnnnnnnnnnnnnnnnnnnnnnnnnnnnnnnnnnnnnnnnnnnnnnnnnnnnnnnnnnnnnnnnnnnnnnnnnnnnnnnnnnnnnnnnnnnnnnnnnnnnnnnnnnnnnnnnnnnnnnnnnnnnnnnnnnnnnnnnnnnnnnnnnnnnnnnnnnnnnnnnnnnnnnnnnnnnnnnnnnnnnnnnnnnnnnnnnnnnnnnnnnnnnnnnnnnnnnnnnnnnnnnnnnnnnnnnnnnnnnnnnnnnnnnnnnnnnnnnnnnnnnnnnnnnnnnnnnnnnnnnnnnnnnnnnnnnnnnnnnnnnnnnnnnnnnnnnnnnnnnnnnnnnnnnnnnnnnnnnnnnnnnnnnnnnnnnnnnnnnnnnnnnnnnnnnnnnnnnnnnnnnnnnnnnnnnnnnnnnnnnnnnnnnnnnnnnnnnnnnnnnnnnnnnnnnnnnnnnnnnnnnnnnnnnnnnnnnnnnnnnnnnnnnnnnnnnnnnnnnnnnnnnnnnnnnnnnnnnnnnnnnnnnnnnnnnnnnnnnnnnnnnnnnnnnnnnnnnnnnnnnnnnnnnnnnnnnnnnnnnnnnnnnnnnnnnnnnnnnnnnnnnnnnnnnnnnnnnnnnnnnnnnnnnnnnnnnnnnnnnnnnnnnnnnnnnnnnnnnnnnnnnnnnnnnnnnnnnnnnnnnnnnnnnnnnnnnnnnnnnnnnnnnnnnnnnnnnnnnnnnnnnnnnnnnnnnnnnnnnnnnnnnnnnnnnnnnnnnnnnnnnnnnnnnnnnnnnnnnnnnnnnnnnnnnnnnnnnnnnnnnnnnnnnnnnnnnnnnnnnnnnnnnnnnnnnnnnnnnnnnnnnnnnnnnnnnnnnnnnnnnnnnnnnnnnnnnnnnnnnnnnnnnnnnnnnnnnnnnnnnnnnnnnnnnnnnnnnnnnnnnnnnnnnnnnnnnnnnnnnnnnnnnnnnnnnnnnnnnnnnnnnnnnnnnnnnnnnnnnnnnnnnnnnnnnnnnnnnnnnnnnnnnnnnnnnnnnnnnnnnnnnnnnnnnnnnnnnnnnnnnnnnnnnnnnnnnnnnnnnnnnnnnnnnnnnnnnnnnnnnnnnnnnnnnnnnnnnnnnnnnnnnnnnnnnnnnnnnnnnnnnnnnnnnnnnnnnnnnnnnnnnnnnnnnnnnnnnnnnnnnnnnnnnnnnnnnnnnnnnnnnnnnnnnnnnnnnnnnnnnnnnnnnnnnnnnnnnnnnnnnnnnnnnnnnnnnnnnnnnnnnnnnnnnnnnnnnnnnnnnnnnnnnnnnnnnnnnnnnnnnnnnnnnnnnnnnnnnnnnnnnnnnnnnnnnnnnnnnnnnnnnnnnnnnnnnnnnnnnnnnnnnnnnnnnnnnnnnnnnnnnnnnnnnnnnnnnnnnnnnnnnnnnnnnnnnnnnnnnnnnnnnnnnnnnnnnnnnnnnnnnnnnnnnnnnnnnnnnnnnnnnnnnnnnnnnnnnnnnnnnnnnnnnnnnnnnnnnnnnnnnnnnnnnnnnnnnnnnnnnnnnnnnnnnnnnnnnnnnnnnnnnnnnnnnnnnnnnnnnnnnnnnnnnnnnnnnnnnnnnnnnnnnnnnnnnnnnnnnnnnnnnnnnnnnnnnnnnnnnnnnnnnnnnnnnnnnnnnnnnnnnnnnnnnnnnnnnnnnnnnnnnnnnnnnnnnnnnnnnnnnnnnnnnnnnnnnnnnnnnnnnnnnnnnnnnnnnnnnnnnnnnnnnnnnnnnnnnnnnnnnnnnnnnnnnnnnnnnnnnnnnnnnnnnnnnnnnnnnnnnnnnnnnnnnnnnnnnnnnnnnnnnnnnnnnnnnnnnnnnnnnnnnnnnnnnnnnnnnnnnnnnnnnnnnnnnnnnnnnnnnnnnnnnnnnnnnnnnnnnnnnnnnnnnnnnnnnnnnnnnnnnnnnnnnnnnnnnnnnnnnnnnnnnnnnnnnnnnnnnnnnnnnnnnnnnnnnnnnnnnnnnnnnnnnnnnnnnnnnnnnnnnnnnnnnnnnnnnnnnnnnnnnnnnnnnnnnnnnnnnnnnnnnnnnnnnnnnnnnnnnnnnnnnnnnnnnnnnnnnnnnnnnnnnnnnnnnnnnnnnnnnnnnnnnnnnnnnntgtcttggcacgcagcattcctaaaggattctattacactttaaaaatattataaattgaaggcctgcctgctcatggcctgaaactgagggtgagaagccaaaactggggcatgagccccctaagctgagtgcctgaggggagccagtgacccccagctctggctagtgtgctggtttctaggcagccttgccctcactgaatcttgggtccttagttgtaatagaaccctttctccaccacatctcatggactcatgggaaaaaaccagtatatgtgtgtgtgtgtgtgtgtgtgtgtgtgttgggatggggagaactcactgtttctccagtctagcccagggccaggagtctcccactttcctttccacccatgcatgggggagacttgaaatactgcttttcttccccacctgtcctggagcatggagagcatttccgcatagacatcttcgagggctgcaacttcacgggccagtgcctagagttcgtggaggactgccccttcctgcagagccggggctgggccaagagctgtgtcaacgccatcaaggtgtatggggacggagcgtgagtacagctggggcttccagacaggcttggtagggtggatagccatcagaccctgtgggtgactcacgagaaccccagcttcctggggtgccaacttacacagcagcgtcacctgctcagagaaggtccatcttctcagctcggataaccctgggcctgggcctctctgcctggtggcttacagcccacaccaacttgttggagatgggcttcaaggggctctcctaggatggatgagagtgtctgggaattgtgcctgtcttcgctagtccaaggcatctgtcagacccggtgcttgccttgtggggcagcttcctggcgcacctgcccattgtacacatgcaggcgcccctcacctggggtttctcctgccctcgcctgaactatctgcctgtgcacacacagatggggctgaacactcaacactctcttcccatcttccctgcccattctggagaagccatcaccattttatagaagcacaaactgactgcagttaactccagagcctttctttccacagcagaagccctgctgggactgcagcctaggggagccccttctaccctagagctgggtacccttcaacctcctctccccccccccaccccagcagaagagccccacaggatcccagcttccctgcacagggttggtgtggggaatcagctcccatggaatttnnnnnnnnnnnnnnnnnnnnnnnnnnnnnnnnnnnccatcttacctgaccccctcccccaagcagatgatacccgagagtccaggggtaggagtccaaaacaatttgccttgagaaattcccaggctaagttgtgtctcatgagatcagaggcatacttttgtatgggagatgtcaggagacccaagacagaatcctcctagcaaccctgggagcctgagggagggaaggcaggagtggacactggatggaagagaatataatctccactttccaggaaggaaccagtctcagtggccaggaggttgaggccaagatgatggatccagagtgttcttatctttgataaccttaactcttatgtgatataagtcttgtgcagaagtagcttcgaaaacggtgatgccctgggtccctggagccctttctgggatccggccagcagtaaagcagggctcctcaaccacctccctgtgccaagagtgttgttccttgtgggttccatgtcagctcaggagtgaacggtccctcatacctgtgtcctaggaggcatgtcaggaaaagcagggacatcccccaacactccaacagactgagcgcccccccttctaaattttaaaaatgatttttatttccatacatttgtcttacttgcatgcatgtctgtgcatcacatgcatgcccggtggggtcagaagcaggcattaaatttcctggacctggagttacagacagttgagagctgcagtgtgggtgctgagaagcgaacctggctctggacaagcagccagtgctcttatctgctgagccgcctccccagagaccccttctctgttgctttcctctaagagttgcagctaggtgagcaaggatgcgcaggattagctgtcacaccagccaggtcccttttcctttcagaatgtccacaagagctccaagatggctcagggcagtacagaatagagactggctcactctcttggagactctagctatgtggtggaaggctgtggttgtaaggaagtgatctgctcgtccctagcatgacaccccccccacacacacaccccttagtttccaatccctgaccctactgtcagattgtaccatttaccaggtgaggggtcaagatgatgaagggaggggcctacgatgacttggagtggaagagctaagggctaaggaaaaggaagtgagctatgtgacctttagtttctccctctccccctccccctccccctctctctcggctgagctgtctgcaagcagaaaggcaaggacactccctgggagggaatttgagaagtttgggactgagtaagaactgcctaggcacatcgcgggagggaggttccccgagaagagaggtcagagtaatactacaacctggatcttagccatctcctcaagaggccgtgagcacccgagcacgcccgagggagtcctgccccagagaaaagctgttttctactctagtgaaagagggggaggggagagcccgaggtaaagacagagacagccctctggtgcaggcaggcctggcggctcctcctccccgacttcctagctcccttaggccagcctccaaacctgagccccaagtgagagcgtccacacgacgactctccctgggtcccacatttacacctctatacttattaagaaccttttccttatgcctgttcccaggaagagaccacccatccgatcttcccagttaatcttcctgattccctggtccactgggttgtaaaggacaggggcctggtacacaccttccccccaaatcccccaacacaagggcgctcttgtcagacctcctgtcctgccagctccagatcctctgtacaacgcaggcagcacagcccacttgtactagagcacaggcaccgccacggctgttggctgagtggatacacagtgggaacggtccccagtttgtgtcaggcgtcctgtcaagagctgggtactctgtgcaaaaatggccctttggtgggtgactgggcatagtgcatccccagtcgctctcgcttttgtcatgggatggtcaattactgggcagtccccatcttgtcgaaccccagcaccaagcccgaatcagacatcgtcaatcaaggtagtgaggagctaggaccgaggggcgggggcggggccggggccggggaagcgtcctcgtgtggttccctccgggtgactcgcccttcctctgcccttcaggtgggtcctctatgaggagccaaactaccgcggccgcatgtacgtgttggagagaggagactaccgctgcttctccgactggggggcccacagcgcacgcgtgcagtcgctccgccgggtgctcaacttcttctagtcccaactgcgtacgtgcgacccacggaggcaataaatatccagaaagcggagtgctggcgggcctcggagtgctttctaggcctctcaccggctggcgggccccaaccgggcagggggaagcctcctggagcaaggaagccaactaactcccttccctgccaaagcctagccagagcagcagccgcctcggggctcagggccacacgagggcgcccgcgagcaagacgcaggcaggctgttttctcctgctagggggccacgcccgagaggaggggcgaggtggcgggggtgggggtggtaggatcatcgctcaataaacacccatagtaatgctattcacaataagcaaaagagtgtgagacccttagccagggccagctggattctgccctcctctgatgtgttaggggctggagtggatggttatggaggagaaggaaggacannnnnnnnnnnnnnnnnnnnccattgcccctacactgaaccacacatttgcatatattaggatatttgacttgagcttgggagaaaaccaaaagtcctgttctttgtgaaataatgcaaacctatctgttacacacaccctacatatgtgaaagcgcaagccagctgtggtgactcaaggccccgtcctaagcaaaggcaggtagatcactgcaagttcaaggccaacttgatctacatagcaagttccaggccagccaggagtgaggccctgtctaaaaaaagccaacaccaaacacaactaaagaagcccagcgacctgtgagaggacagttgtagcatggcagtttgcatgcagccatggagctgtgctcccaacgtgaagtgaagcgctttatgatgtgtgtgtcagtcagtgaccatgtactcgagggaagcagggagaagaactgggtgacagcaggactctcactcaggggtgaccctgtagccatacacttttttgcaacccacttttttttttttttttttcgagacagggtttctctgtgtagccctggctgtcctggaactcactcagtagaccaggctggcctcaaactcagaaatccgcctgcctctgcctccctcgtgctgggattaaaggcgtgctccaccacgcccggcttgcaacccacttttaatgagggttccacctctctcctctagcccatcacccagcagaggtatggaggagaaaaggtattaggatatggaggaggtggacctgttcagcaatggttctttaggagcgagtttgatctttttggacagcagttcagtcccataacaaacaccaaatacaactcagcagctgcagagcagccctctaggcaggcagacaccaggcacgaaccagcagctgcagtccagtcctttcagcacgcagacaccaggcagctgtagttcagtcctgaagaaaccaccaggctcaccaaccagcctacggtgaggctgtggaggcaagcaagctgctgcaggaatcttatgagcagttcttgggtgagtttctctcaatgacagcattaccacaagttgagctcaacaacagtatgaaaggagaaccaataaatgcatgtctttagtgaagaatagtgaggcagagcaaaccaaatgaaggctcagtgctcctctcccactgtctgtggggtcttatttatacttctccatcacacatcctttcacccgtgtctgcttcaggaaatcagtctttcacgtgtttgctgtaacaagacatcctttcacctgtgtgccccagcacaacatcatttggcatagctaactttccagagctagaagttaccacttcactgccctgtgcctcagtgtccacagaggcaccggggtgggggataatagtctgctctaatgggggaggggcttcctcctgggagccagatggcacccactgccctaccttgccaaagccagttgcagggactcctcttgaatttgcctctctcccagctcccaggaacagaggcgcctcattagggcgagtcagtgtttcacacagctttgcattcctgggtgacctccctgtcaccccagccccctgcttgctaatctgtcagtaaaatctgcttttggtcaggaagaagaaaaacaagcttctcactgcagagcctgtgggcagctgtgcagtttatctgaagtccatccagggggtcgatgaaccgaagatgagagagcctttagtgtggtacatgcttctcccatttctgtctccacgctgcggtttggaaaactgggccttcttagagccatctccgtgttcctcagaccccttgctggtcagggatctgaaggcattgtttatcaggcctggtcagaccacaggggaaaactttccctttgaagcccatactgatgcctagccatggctgtggtgtgcctctccctactcctcagcccataccagggtgatgcactagtctctgtccactcctttccctggcttccctctgccccatctccagctgtgtcctgcttggccactccttggctggaaagccttcagagcagagctaacccctaagtgtccttttccctctagaaacctcggtagaggttttaacataacctgtgagacgagacatgttttaaaatccagcttcatggctgagggtgtagctagtggctgagcacttaccctaccatgtgtgaggctctgaattctagccccaccactgtgaaaccaaaaataaaccactgcagggtgtggtagtgaaggtcttgaatcctagcactcaaggcagaggcagagaaacagagagacagagaggcagagagagaggcagagaggagaggcaaagaggcagagaggcagagaggcagagaggcagagaggagaggcaaagaggcagagaggcagagaggcagagaggcagggaggagaggcagagaggcagagagggagagaggcagagaggcagagaggcagagagaagggcagagaagcagagctctgtgagtttaaagccagcctagtctacagagtgagttccaggaccgccagggctacacagagaaacattatatccaaaaaacaaaaccaataataatagtgataaataataataataaataaaccgccacagagttccctttggtgtgttagctacttttctcactgtcagaatacctacagagcaacttttagaaggtttatctgggcttatagtttcagaaggtatgggccatcatgatagccagactgtggtggggttttttaccactatgtgtctgttggtggggaaggtagctgggggccccagccaggatcagagatgcatattcttcaaggtttgctccagagacccgtatctgagagctggactatatatcctatatgtcccaaagattctacaatcttcccaaaacagtgtcaccagctggagaccaagagtgcaagcacaggaccctattggggggcattctacattcaaatcctaccagctggagaaggtacagtgctaggctgaggtggtgacaatgtgtacacagcagtgtgaatgtgcacacagtgtgaatgtgtaatatggcactgtaaatgtgcacacagcagtgtgagtgtgtgtacacagtgtgaatgttcacacagcggtgtgcatgtgtgtacacagtgtgaatgtgtgcacagcagtgtgaatgtgcacatagcagtgtgaatgtacacacagtgtgaatgtgtaccacagcagtgtaaatgtgcacatagcaatgtgagtgtctatacagcagtgagtgtgcacacagcaatgtaaatgtatacatagtagtgtgaatgtatacacatcagtgtgaatgtgtgcccagcagtgtgtgtacacagtgtgaatgtgcacacagcagtgtgagtgtgtacacagtgtgagtgtgcacacagcagtgtgaatgtgtgcataggagtttgaatgtgtacatggcagtgtgaatgcttcctctgccatggagacatgcattcagccatagtggctgtggtgggttggatgctatgtggattttgcacagaacaaaagcttcactcttcttgttgaggtacacagagtctcagagccatttgcgtgtgcttgtggtactgaagacccttcctgaccctggcaacatactgggtcttacttgtcccaaatgtgcctcacatagtccttgtcctgatgttcaccttttgttggtcttgtggttcccgttgattgcagtgcagggagcgctgccctgactgctgaggaacctcaaggggagacccatggagtaagaccactgcagagcaaggtggggctacctgagcctaacccaaccttctcaagccctgctcaggcaacaccttcatggtctggtgtcagcaaggacacagaaagaagtgacttgctatccttgttaagcctgccctgcaccatgaatgtttttataaaaaggctgttggcttccttgctgcctgtgaacctgctatgcagtctgtggaataaaacagtcctgtggagaccagctgcaactttcccttgtgacctctctagatgtgtgtgtgtgggagtggtggacagggtcacaacctgcaagtgtgcagttcctttcttagtaatgtggtgtggagtcacccttgaagccagctggcagctgtgcagtgttttgctgggtatggggtatatccagggtatatcagggtatagtcagggtccagtatatccagggagtcctgcctgggtccatcctgcaggtgtgcagccctttgttgaaaatgtaggtcaacaattgaattgtgggtcagtggtactatgtcagctgtggctaagtgttctaatctgtgagaccacatgtctacactccttgggtggggacagagatcctgggtggaatgagaccagtcattgccaatagaacaagtttaagatgaggtaggactcaggtttaggcctaaagtagttttaatgagtggccaggaaggccctttctattcatcctaccagagtcccaggacccagaatggaaaatcttactgttgaagaaagctcctttgtcttgcctctgatccctttcccacagagtagtagatgcttagtggtggtggtgaaatacaatgttatatattatttgtaattcattgttcctctataaaattgagttgagggaaaggaaatagtatgataaaaatattgtatggtggtgcacgcctttaatatcagcacttgagaggcagaggcaggcagatctctgtgagtttgaggccagccttgtctatagagtaagttccaggaaagtcaggactacatagataaaatctgtctcaacaaaacaaaacaaaaaaccagtaggagattctggcttgatgggagactgagacaggaagttcgtgagttggaggtcagcttggaatacaataatgaatcccaatctaaaaacagtgtaaaataaaatagtctttaaagagatctctggagcacagaagttcaaaccaggagcaggaaacggcaaggctaagtaagcaaatcatcacagagccagggtctttgtggagaagaccccgcctgaatcggccaacgcagaacgcggcccgggttccgtggctctctgaatctgagtaatagaagcatgaggtttcttcacacacagtgattcctgggatgtgggccagaggaaagcttctcctgggggcatctgaatccaggctgagggtcacgagccccgctggagctgtgtgctccagtgaagaaaataatgttctgaggatgaccacacattggctctatgccttctatacctttcaaaccttctaaggagtctgatgtcagacaatttgtttccaacagatttaaacacagtgtagtttagaaaacagtttcctggtgtagtgcaatcccaggtgcacatggaagtataattacatcaaaactcaactgaggctaccctggaactcactccctagatcaggctggcctcgaactcagaaatccaccttcctctgtcaccactgcctggtgttataaagacttatttttaattgtgtgtgtgtgtgtgtgtgtgtgtgagagagagagagagagagagagagggagagagagagagagagagagagtttgtgctcattgagtggaaatgcccgtggattccacaaccctcagccccactgcaactatatagctgtgagccacccgatgtgggtgttgggaactgaattcaaaccctctgcaagagcagagccttttatctcaccagtcaagtgtgatggtgcatactgtaacctcagcactggggaggtggggacaggaggattccccaaagcttgctgaccagccagtcttaccaaattgctaagttcgaggttcactgagagatcttgtccccccaaaagaagcagagggttgccgggtgtggtggcgcacgcctttaatcctagcacttgggaggtagaggcaggtgggtttctgaattctaggccagcctggtctacaaagtgagttccaggacagccaggattatacagagaaaccctgtctcaaaaaaccaaaacaaaaaagaaaaagaagaagcagagggttgttaggagcaccgtatgaagattcttgtgcccagagatctccaggaaaaccaaaagttaaacacacaggattgnnnnnnnnnnnnnnnnnnnnttaaacacacaggattgtcttctcaaaggaatggatgtaaaatctgttctttccatctagagagctggaaattggaggtgattaatggcctgccgatctgcattacctattggcccgggccatatcaagcttctagaaccaggaccaggggtggctagtaatttaaatgcccctcacagtcaggagcgcccctgaatgacccttacgttgcctgcattgtcagaggcaagattcttccttactcccttaagctagcacagctagcctagttctagaacccatcttcttggaagaaatgatgtgaatacagcagcatgaatgctggtacaagttgctttttcttcttcttcttcttcttcttcttcttcttcttcttcttcttcttcttcttttaagatttatttattcattatatgtaagtacactgtagctgtcttcagacactccagaagagggagtcagatctcattacggatggttgtgagccaccatgtggttgctgggatttgaactctggacctttggaagagcagtcgggtgctcttacccactgagccatctcaccagcccctgctttttcttctttacttagtccaggacccagccagggcacagtgccatccacagtggctctgcctcccacctcagttaacctagtctagaaactccctcataccatgctcagaggcttgtttctgtgctgattctaagcctaagttccaagactaatagccacacacttacatgcctgatgtatttgaaggttatcttcatctatgaatttcttggttctgttactaataggaactccatgaaatgattagcacattagaacatcattgaacccaaatctctggtcattgacaagatggcttgagccacactcattgccccaggagctcaagctgccctcgtgctctgggaccctgtgatgtgtagcaacagtggtgtgtactgcttctttgaacctctgcttggccagctgccaccccttaatgtgtgcactattgcaacaaaactgagtctcagtaaaactacgtgcacagtgcttgctgtgcacttcatgagggcttgagtttgagtcctcggaacctgtgcaaaagctagactcattgcagtcctagagctccactagcaagatgggaggcagagaccagataatctcccaaagccaactgatctggcttaagcggcattgaatgagactgctttaaacaaggtataaggtgaggaccagtatttgaaattgtcctctgacctgcacacatgcgctgtgacatgtgcacactggcatgcacacacacaaacctgcacacttatgaacttgcacatatcttacatagcaaaaggcagtcgtggtgacagtggtggctctgctgccctggctctcagcagaggacactgagcgcagagagaaaaccctgagcagcctggaggcatgaagctgtgctcagagcctccacagagagcaggcctcagcatggttctgagggccgtgcggctgttggagtgagtgaaagcagatgctgttctcaggcctcctcgctagaccctcccactcagacacatatggctttacacacacgtgctcacacgtactcacagaaacgtacactgatattcagatacgcatgtgcacacaaacacactttcacactctcatgcacacatctgcaaacatgcatatgtgcacacacgcatcactcacatcccacaggaggcctcgcagcatgcatgcatccagatatgcaagcacattctcactttacatgagcacacatgggcactccacactaatggctgctctcgtgcatgctggcatacagtctcttacacacattccttcatctgaagccgtacgtgcctgctgagggtcgtatgaagggtgggagacagctgtgcctgggatggaatttagatgtattttcacagatgcacacacttgggaaacaatcaccactgtccagagagggaactagtgacttctgagttgtttcttctgagtttttgtttgtgtttttccttttcttttgagacaggatctcagtatgtagcctcagcaggcctggaactcatgatgtagatcaaaatgcttaaaccctgcctctccggagctagggtaacgggtgtgcatcacaagcctggtctggggcatttcttaaaaaaaaaaaaaattacacttaattagtttggctaggcagcagtgacacacaatcccagctctctggagacagaggcaggtggatctttgttagtttgaggccagcctggtctacagagagttccagagctgcctgttagaagaaccctgtcatggaaaaaaaacaaaacaaaagcaaaaccaaaaactaaccaatcaaccaaccaaacaaacaaacaaacaaaaaaaacacttatttatttggaattgggttacgcatgccaaaatgtgtgtgtaaagatgagaggagcacctgtgagaggccgttctctccttccaccagagtctagagactggactaaggtcttcaagcttggtagcaagtgcctttacctgatgaatcattttgccctagtattattcatgaatgtatgtatttatacatccacttattttagtttatgagtgtcttacttacatgtgtgtatgcctggtgcccatggaagtcaggagaggcatcagaccttctgtatataactagatttatagatggttgtaagccatcatatggatgctggacccaaacccaggtcctctgtaggagcaatcggtgctcttaactgctaatacatttctccagccccgacacagtcttatttttattatgtgtgtgtgtctgtgtgagtcagttcccttctattgtgtgagtcccacagactagattcttgtcatcgggcatgggggtcagtctctgctggcccgttttttgtgctggaggttcaacaaattctttggaactctggattttaacttcatatccaatgtggtgactctctaccacagattcctctaacagcttttcccctctctgttctctttcctaagacacttcacactggttgaattcattctgggtcacggttttcttttcatttactgtatttttagtggccttccttctttgcccaagtaatttttccttctgtttcattccctgaagtttgcactgcactgtttttgagtccatggtcttctgtaacacctaatgagctgtcaatctcatcccaagttgttgcttaactttagacatcatttttatctctagctcaatctgggactctgatatcttcaatgtttttgtgtggaaggaagggtggatggggtctgtgttctggacatatcctctgccaccgagctgcctctacagactttttcaacgtgtggaatgtaattcatgactgctggacagg

SEQ ID NO: 949 - DNA, 333 bp, Mus musculus
atgcatgggggagacttgaaatactgcttttcttccccacctgtcctggagcatggagagcatttccgcatagacatcttcgagggctgcaacttcacgggccagtgcctagagttcgtggaggactgccccttcctgcagagccggggctgggccaagagctgtgtcaacgccatcaaggtgtatggggacggagcgtgggtcctctatgaggagccaaactaccgcggccgcatgtacgtgttggagagaggagactaccgctgcttctccgactggggggcccacagcgcacgcgtgcagtcgctccgccgggtgctcaacttcttctag

SEQ ID NO: 950 - protein, 110 aa, Mus musculus
MHGGDLKYCFSSPPVLEHGEHFRIDIFEGCNFTGQCLEFVEDCPFLQSRGWAKSCVNAIKVYGDGAWVLYEEPNYRGRMYVLERGDYRCFSDWGAHSARVQSLRRVLNFF

SEQ ID NO: 951 - DNA, 29454 bp, Homo sapiens
actgcgcttcgctagcggagcgttgggcagagcgggcatcgctgccccatgcagccctggaccgcggacggagtctagtctccccgctctcgcccacgcctgagctttggtatgcaaagtgtttccaactttttgttcgtttataaatatctttaataaatatatatattgagacggagtctcgctttgtcgtcgcccaggctggagtgcagtggcgcgatctgcaacctccgcagctcactgcaacctctgcctcccgggttcaagcgattctcctgcctcagccttccgagtagctgccactacaggtgactgcccccacgcccagctaatttttgtatttttagtagagacggggtttcatcatgttggccaggctggtttcaaactcctgacctcaggtgatccgcccgcctcggcctctcaaagtgctgggattacaggcgtgagccacctcacccggtctctctctctctcatgtatatgtatgtgtgtgtgtgtatatatatatatataatttaagtagagacaaggtcttaccgtgtttcccaagctggtctcgaactcctgggctcaagcaatcctcctgcctcggcctcccaaagtgctaggattacaggtgtgagccagcgcgcccagcccgtttgtaaacatcttttgagcgcctcctccttggtgtccacagctctagcgctgagcgcctcgcccacacagatgcgatggtacccgctggcgagagaggttggggagtggggctggggggaggcgcgggcagcgagaccaggtccttgagccctgggaagctcagctcaggtgttgggaccgcaccccaggatgggtgcaacatctcaggaggcctgatctcagggtcctgcgtgtcctggtccctgcttcacttgaagggccatgggaagccattgagcaattttaggtaggatcacattataggttttaagtgagtattcacattagagcacctaggagccccccatttgtaatgtcttgtcttttttttttttttttttttttttttttttttgagacaggatctttctctgttgcccaggctgtactgcagtggtgcaatcttggctcactgcggcctcgacctcctgggctcaagcaatcatcccacctcagcctccctagtagctgggaccacaggcatgtgccaccatgcccggctaattttttaatttttttgtagagacaggatcttgcgttgttgcccaggctgatttcaaactcctgggctcaagcaatctttcctccttggcctcccaaagcactgggattacaggcatgaaccaccttgcctggcctgtaatgtcttatttcttaaactggaaggtagatttgctgcctgaaatgactcataatatatatatagggaaaggagccgctcttgctgtgggtggagaacggtctggaggagcccagagcagacagactgggatgctgagaggctcctgcagcagttccactggtactgacagtggctggagctgggagtgggcatggagaaggaagtggggaagggggcagaacctgggggtctcacacagtggtgtcacatacagcctcaatttggaggggagtcctgagtcctgtctctcaaacgctacccaggatggcctctcccaagccccaggaccactctgctcccaagagcattaggatgacgctggaggcagggggctactgggaaagtgcctcccctcagcctgtcacacacacccagagctccagagtgaagggctggaagggcctcattgcccactcacatgactttgtattgaattagggcaggtttgggagtagcaacaaactgggaaaagtctaaaatgaacccacacaacaaggaatagacaacagcaaaggaacagatagcggactcacacacacacacacagcaaaagaatagatagcaagttaaaacacacacagccaggcatggtgcctcatgcctgtaatcccagcactttaggaggccaaggcaggaggatcccttgaggccaggaactcgggaccagcatgggcaacatagtgagaccccgtctctacaaaaaattttaaaaacctagctgggtgtgggcgtgtgcctttagtcccagctacaagggaggctgaagcaggaggatgccttagcccagttgtttggggctgcattgagctatgatcgtggcactgcactctggcctgggtgacagagtgaaactctgtctctaaaacaaagaaacacttgcacacacacaggcacacacacataatcaataaggaaagacagaaaaaaatgagcaaagcatatgaacaagcaatttacaaaagatccaattcaaatgaacgctatacatttgaactgatgttgagcaactggccttggaactaccaagggtagatctcatctgtatgtcagtggggcaatttggaagacctctgtggcatctagtggcttgaaggtgaactcatgcttcaacccagcaatttcacccagaggcatgggcctcaaaggaggcagtattggtcccagggtgtggttggaattttgtagggtgtttctgtttgtcagaatgctggaggatgggtgggcaggccccaggatgctggatatcccaccacatccaaggagacactgtcccacaatttcccctagaaacgcatagtattttttgtgtggctttaatatatactgaagatttcctggtatgcaatttattagatatataaatggaagattttacttagttttctgaggaattctactgagctttgttcattcaccatttcagaaactcttgtcactaaaacaaaaaaccaaattgcagaaggctacatataatgtagccacactaaaaattttctattatttacagatacatacaaagaaagtaaaaagatgaaaacacacaaagacataacacaaaaatcaggacagtatcttatccttatggggaaggaagccttcaattctatgtataatgatttcttattttaaggaaaaacattgatccgacataaacctggcaaaatgctaagatttgacaaactttgtatggtggtgttattgttccttatattatttcctattcttctctgtgctctaaattacccaaaaacgggagagacaagaggcagagaagggaggcaggcaaacgggtgatggctcagggtgatttattattaaaaccattagcctccacgctgtaaaactctccaatgctgagcagctactggtagttctaaggctacatgttattgagattttattttttaagccatgatagcattcttagccttgcttcttctgtgctgtcacgatatttattctcagtccatttccttagaattttgtccccaactagcagctgtatagtgactcaagatctcacctacctcaaggtacattttaacagtgctctaccaaagatgactcaaaaaaatgactctgatgttgaggtttggtgatactggcatttgcatattatgtagctattttggggaggggttctacctggccacaaatagataatatgaatcttagcagactcctcctctggtaactgaattataataaaatcccaggtgggaattgagatattgcattagaaatagggaatggaggtgaaatttgcaggtatcttattcatctacccatttttaataattctttgcgtggggctttcagctaggcattttttcatatatatttctcagaaaacaccccaaatcactgcttctgttttggattctgttgtcatcacctttttgggttgtctgtgtgctctggccctgctgtgatgagggcaaatacaaattaaaaagaagaagttcagctgggcacagtggctcacacctgtaatcccagcactttgggaggccaaggcaggcggatcacttgaggtcaggcattcaagaccagcctggccaacgtggtgaagccccatctctactaaaaatacaaaaattggccaggcgcggtggctcacgcctgtaatcctagcactttgggaggccaaggcaggcggattgcctgagctcaggagtttgatatcagcctgggcaacatggtgaaaccccatctctactaaaatacaaaaaactagccaggcttggcggcgtgtgcctgtagtcccagctactcgggaggctgaagcaggagaatcgcttgaacccaggaggtggatgttgcagtgagttgagatcacgccactgcactccagcctgggcaacagaacaagactccatctccaaaaaaaaaaaaaaaaaaaaaaaaaaattagctgggcgtggtggcacacacctgtagtcccagctactggggaggctgaggcaggagaattgcttgaacctaggaggcagagattgcagtgagctgagatcgcatcactgcactcctgcctgggggacagagcaagactccatctcaaaaaaaaaaaaaaaaaaaagctcttaaaacaacaatgagacaccactgcacacttatttgaatggctaaaatccaaaacttgatagcaccaaatggtcagaatgaaaaatcatatagccactttgaaagagagtttgacagtttctttttatttgatttgattttgaattttttagagacagggtcttgctatgttgtccaagctggtcttgaactcccggcctcaagtaatcctcctgccttagcctcctgagtagctgggattacaggtacaagcctctgcacctggcttttatttttttttcagtttgttgcacaactaaacatacctgtaacatatgatccagcaatcccactccttagtgtatagtgaaaggagcacacaaaaatctacacgtggttgtttatagaagctttcctcataattgccaaaacttggacacaaccaaaatgtccttccattgatgaatagataactaaactgtggtacttccagacaagggaacatgattcagcagtaaaaagaaatgagagactaggccaggaaaagatatgagggaatcttaaatgcatattactaagtggaagaaaccaatctgagaaagctacttgctgtcttagtccgttttgtgccgctataacagaataccacagactgggtaatttacaatgaacacaaatgtactggctcacagttctggaggctgagaagtctaacatcacggtgctggcatctttcaagggccttcttgctgtatcatcccatgggagaagggcaaagagagggtgagagcaagcggttgaccttgtagccctttatggtcagcgttaatccatgaatgagggtgaagccctcatgacctaaacccttcccatgagaccgcatctttcaacattgttgcattggggattaagtttccaacacatgtgttttgggggacacgttcaaaccgtagtagctacatactgtaagattccaaatacatgacatcctgaaaaaggcaaaaccgtgaagatagtaaaaagatcagtggttgccaggagttaagggggagagagggataaacagatggagcccaggggacttttttttttatctttttttttttttttttgagacggagtttaactctgtcgtccaggctggagtgcagtggcgcaatcttggctcactacaacctccaccttccaggttcaagcaattctcactgcctcagcctcctgagtagctaggattacaggcgcctgccaccacgcctggctagtttttgtatttttagtagagacagggtttcgccctgttggccaggctggtctcaaactcctgaccttaggtgatccacccgccccggcctcccaaagtgctgggattacaggtgtgagccgccgtgcccagcccacacaggggacttttaaggtggtgagaatactctacctggtgctctaatggtggaaccatggcattacactgtagaggcagcaaagttctacctccatcctcttagggtcctggctgggcctgagaaataaattgacctaagacagattaacaagagaaaagcatacaaacttatttaatacaagttttatgtggcatgggagcccttataaggagatgaagacccaaagaaaaagttaagagtcaaacacttacatactcaactggacaaagagtagcaagctgtgaaaaatcaaccacattatgtggggaggctttaaaaatgtgttattttaacaaagtctacgccgcattctctcaacttctcatcctgtatcccgatgtataacataggttcatcggctgtgacaaatgtaccactctaatgggggcgctgattgtggaggaggctctgtgtgtgtgtgtgtgtgtgtgtgtgtgtgtgtgtgtgtgtgtgtgtaggggcagggggtatacaggaaattgctgtaccttttgctgaattcaacttgaacctaaagctgctctaaaaaataaaacctttttttaaggcttatttttccctgttgaaaataagggaagaggcttccctttcctcccttttcttgcagaatttccttctctgtcattttcaaatgtgtgtaaatctttttaatggctaaacaagcctcttgccagtctaacaactcagtcatgtttcctctgggagcctctttgagtcttgacatcaaggagtaagtgcccccaccctccccgtttcctaagaagcctgacttcagctgtcacctgactccaaattgcaaaacccacctccagtcatagagatacaagaaaatcagcaattttatcctgaaaacatgaatgcagtgggttgtgtctgcttggctacagaagagtgagatctctctccatctttgcgatctcttaggggagagatcgtgatgcagatcgcattccagtttaaagtttattcaataataaaattgtttttttttccttctaccttcgtggagaagttttctgggttggctggagattttgtttttaattttatgtccccaccagggcccaggtccagagagaaacattggaatgtgtggcttggcaagtaagggcgccagtggaggcagctgggcggcgtccctagggaggggcgtccctagggaggaccgtccctgggttcaagggtgacatgcaggttctggtttgtaccctgtctacttttgaaaacctcccacagcagaggcaaggtcacccctctgccccaagaatcacataacctcctcttcctgggcctcagtgtctcatctgtgaaatggtcataaaaatatactgtttgaaggaagagcagcccaaactcctccccaaagctcctccctcccctccagcagaagcccctgtggagcacctgcccctctctcctttgatctcagagcctgtcccccaccaccccagccatctgagtcatgagtcctgtgttcccagctcatctccccagccgtgtgggggctgcacatcctgtgggctccatgttcgctctgctcactccacaatctctgagcctctgctgtctgccaagtgctcgttctgggccctggggaactctccctccgcggtggggctgctttgtgctgtaaactgatcctgggcgtccagggtggcttagttggtgcagcagagaggcaaggggcagagcactgtacccccagctcagggcagcgcgggtcacctgggcaccctaggcaggatcttcaaggagagagggacccagggagggagagtgccagggagggaggcaggcaggaagagagcgggaggagggaggcctgacctggcctggcgttttgtggggtgtgggggggtgcatcaggagctgggtgagttggagccggaggtctaaggtggggacctgggagctcagaccagagcagccaggggaggggcggtcaagggctgtctgtctgtccggggaagcttgggttgcatcctcgtggagacaaacaagttggcaccaaggcgagactacctgcagccaggtgagaaaggggagtgggctggggagctcggaacaggccttgggagggagggagatgggcgtgagggctgaggggcagcgcaggggaagaaaggttggagggctagagagacacctcccctcctccccccaccactccagggcagggcaggggcagccgcgggctgggcgggagggctcagggaggaaggaggctcgggagctaaacgcggagagcacagggagaccccgggcagggcgggctgcactcgcggtggcacagggtggccgcggcgggtcccaaccgcctggtggcccctcgggcttagcacgcccgacagcactaacgctccggggccggcccagcaaatcttttgtccggggcggcgctgagccagcagggcgctgcccggtgtaaacggggacccgcggaaggggcggggcgcaccatggcgcagcgctcggggaaggtgagtgcgtccctcaaccccaaggaaaccgagtggggctccgccttcgccccctgtgctaggggatgcaggagggtgcacactgttgatggtgacaaatccaagggaagctggtttaatttcttaataaaatggggtggcctcgctactggcctggggcctctctggtgtggatggataggaaggtctccatctccactccttccttctgggattccaacccctcgccctgcagtcaggagcagggagggtgttcagactccctggggcttccttggggtgggggaggcttggcttgtcccacagccctccgccccactgctgcggcttctttgcccaaggctggcctctatggcttttccttcccagggtctcttcagggacacttagggctggttctctgaaaaatgttgagatttgagggagccccgaatccctttggtgcccagacctccctgaaggtttcaggggccctctaccagccgtgcctggtgcaggaaggacgggagacctggctctccctcgccctctccagtgcccctagcctagccactcccatgaagcctttggtctccaaggccacattccagagtgtctgggggtgactgtgttgctgtatcagtctgcatgggccaggtgatgcttcagtaacaaagggccccagtaactctggggtgcagaacgccaaggtgtctgcctcctttccggtgaacgcatgtggccacgcctgactccaaggggcctggaagggcaattctcgtgttcttttgagcgaactggagacactggtgaggcacaagcgaccatagtgatggggaacatcactgcactctggcaggacccttctagggccacagttcttgaaacccaaagagttactaaatggttgagattttaggttccacagcaggaaatgagtctggcgggttgttattgcttcactttgttttgtttcgggacaaggacaacctgtgagtgccacgtagctataagacacgatgtctgaactcccagcagggtgatggagctccagatctgatacatgcctgctacccaaaggagtgacctacaaaacacagagagacagggtggcacttataagccctcttttgcgaacattaatcccgagccaggccctgacgcggcttcggcccattcagcctctccagtgaaggaggcccaatcccaggaacccgaatttctgcaaaatatatgctgggttaccatgagagggttgtgggtgaaatttcttcttttgaaaacacctcctttaatgttattatcggctttatgttttaataattaaaaaatgagttaaaaatgcagtggaagttgaaaacagcccattttgaaatgggcacctagacaaaggggaaacccctgtccccaaatcgctgctgaaatttgtctgccccactgtgagctcctaagggtggggaggaacagtagctgtgtatggcatcagcctgccagctgttcgttcttttgcccaattggcaaatagtgttgggcacctactgtgtgcagcaggtctgggcttttgggggcctgggagtaggggttccatccagggtgttgggacccagacgccagcctccaacgctgacggagagaagcccctgaccctgagctctgtaacctgccctttctagatcactctctatgaaggcaagcacttcacagggcagaagctggaggtcttcggggactgtgacaacttccaggaccggggctttatgaaccgagtgaactccatccacgtggagagcggagcctgggtctgcttcaatcaccccgacttccggggccagcagttcatcttggagcacggcgactaccccgacttcttccgctggaacagccacagtgaccacatgggctcctgtcggcctgtaggaatggtgagtgggcccgtccaccgaaggctgagtcttcctgctggagggaccgagggtcagccctggcagacagtggcaaggaatcggggagcgtggtcctcccggctttaaagtctgtaagactgaaggagctatacccagagccacctgctggcatgaggtgagtaggtggggggccaagttgctatgaactgagtgggagtggccctgagttttcatacaggtatcaataaaccactttaagtttcggagccaaaaatctagctgcattttccatttaaaatgctgttgaaatcatccaaatttagatttccagccagataggggacactccgccaatgggaggctgatttgggcctagtgtggccactagtacaggtggtcttgtggcacattctggagccttccatgtcttggaatggctgatggaggaagctgaagaatcacccgcctgtcaggggaaaattggggggcaggtcccttggaattacacaggtagctgccgcccaagaggtgtgtgcagggagggcagacgaggggcatggctccccggtggcgaaagactgtttcggtccagctgctcctagggtgggatttaagcaaggccgttcccccaggtcatgggtactcactgacctgctgtgagctctggagcttcaggtggggagtggcggactcctgagcctgggggcgtgcatctctcatcacagagcgtctcgcttatgtctgctgaggaccctcccccgacgcctgggctgggtggttctggtgaacatctgaggaaccccagtaaaggggcctttgtgtggtgccccctctcttttctgtatcagttgcaaaaccagctgggctttggcatctcaaattgtaagaatgcttccttagtatttcttccaggctgtggtccatttggaaaaaagaaatttaaatggttggccctggaccctgcataatgctatttatatgaaaaacatccttggtatcttgcgaactgctgttctcctaagagctagcctggggccagctgtgacgcagaccaggccctgccggcttctgagccaggcaggggctggccctcctctgtcttttggaaatgcgggaatcatatagggagatgtgctgagcctaggggacaatgatgtcaaggccagcaggggtttcagcacatgagatctggtatttgttttagatttttggctttatgttttactaaaaggttctattacagttttaaaatgttatcatttgaaggcttgcccatgggctgtggcccaggggtggggaagtcagaacccggagtgtgtggctgtgatcagggccggagtcccccacgctgagcacccagagggagccccgtgaccccagccctggtctgagtgtgaccgctggcctctggtcagtttggccctctttggacctcagattttctagttgtagaaagaggagcttggaccagctcagtggcttggaacattttcagagtaatagaaccctttcttccaaccacatctcatgtggaagaacaaacagaagtgtggggttgaagtgtgtggggtgggggtgcccagtgccttgggtacctcctaattccttcctgcatggggcttctgtttctgggagaggggaattcacagcaacctccttctttccttcttttttgcttggtcttggagcacggagaacatttccgcctagaaatcttcgagggttgcaacttcacgggccagtgcctggagttcctggaggacagccccttcctccagagcaggggctgggtcaagaactgtgtgaacaccatcaaggtgtacggggacggagcgtgagtacaggccacgtggccgcaccccgaggcccggctaggcccttcagcaccaggcgtgggaggctgcccgccacacaggggtggtgggtggggtgggaatgagacctccagcagtgggcagcgtgtccctggccccacaggccctctcctttcctcagctgcctcacctgccccagtcaagcagcggggagcttcccctgtggcccagaagggcctcagagagggactctgggccccagaggcaccctgagaccttccctctagggcctcagtccaggagcagaggtaggagagtaccttgaaagttgcacggttctctgcgattgatctgatacaaggggccgcctttggttttcttgaaccgggggacacctgcttaccaaggggtcctccagggccttatgggctggaaaagccacagtgggctcacttgctctgagaagggtggaccagcccaccctgcccccgcgcctaccccgcagagctgacccctgaaccgggcctctctgcaaacccccaccaccctggcctctgggaggagatggacttcggggtggctcactcctggacagaaagtagctgggggaattttgcccaggcccagatgggtttgtctgccccacacttgggtttcctcctggtcaaccaagggcagcctgtgtgccccctcctgccctcccgcacactccccttttgcaactatcctctgagcaccttcaagttggccatgtattttcattgtccagcccacacctctaggtcaggtagatattatcgcccccgttctacaaagggcaagctgagactcagaaggctgactgcccggccgccccgtgggagtggcacagctgagactgcagccaagcctgtgtctgtccctgttccagagctagccgctttcccaggcctcagtcccctcccctcaggccaagagcccctcacacaggttccagctggctgtgcatggttctggcgcctatcgaagcaattgaggaacaatttgccgtctatactacagaggttcaaggccagggagcttcggaggggatgcagggggcagagggactgcagggagacagagactgggccgaggcagagctgggcacaggtggtaccccatgtccatgggctccaaccgcacagcgaaaatatccccccacaattgtgtctatgctgaatatgtacattattccctgaaagatactgtacaactatttacatagcgtttatgttggattaggtatcataagtaatctggagatgatttcgagtccagtaagtcctcacttaacattgtggataggttcttggaaactgtgactttaagtgaaacaatgtatggcaggtcctcaaatatgtcatcttgttcaatgtggattcattataaaattgatgaggggagaaatggctttgttatatatcatgtgcttaaagccacggttcccaagaacttactgacggtgttaagtgaggacttactatatatgggaggatacacatgggttatatgcaaatacagtgccattttatatcaggaacttgagcatcctcggattttgatatccaagggaggtcctggaaccagttcccagggatagggagggactgtgtacatcccacctttccccggtggcctgatgttggcccccttcctgctgtttctgtcactctagctggctccaggattccgttttacgaaattgcattttgccctaaattggtggcacctggagcccaggggtggcattccaaaacaagaatttgccctggaaaacttgctggctaaattgtgtcttgtaaggcccaagtcatgcctttgcgtggaggatgtcctgaggccctagacacaatccccccggcccacccccaacgctcaggggcttgttgagaacgaaggtggggaaggtggaggctaacatttctctgactgaggggcacacaatccccactgtccctgagaggagccagccatcgggaccccaggtgggggacccaggagctcagcctttgccgcctaagactcttactcttacacaaatgtaagcccttgtcaaggaggtaacgcccccaggtcccctcgatccggaggggacactgctaggaggcctttcctggggtcgggggagtgggcaaggcagggtccctccaccacctcccactgccaagactccttccctctgggtcccacatcagcccaggcatgacccatcccctcagacccgtgtcctggtgggctctcggagggaaatgcactggcgttctgcctccacctaccctcacctggggaagggcacggtgctgatgtgggcaggacaggcccctgccctttcctctgtctgcctcctcccagtagccacagccaggacaggggacagcaggatgggtggttccccgccccctccttttgggggtgtccatgtgagaaccctcatgtggcccaggacatggcttggggcatttcttgcccaccacagggtaggaaaggaccagctgactctctgaggtgcctctgaggccccagctgtggcacaggtgtggggttggaaagctgtaggtgtggaggggcatggatacgggggccatgagggtggggtccaggctggaccaggcctgccctgagtcccccagcaggtgctccaggctggctcacaccctctgcctctctctcttccttcctggccccaacccttgaggcagcagactgtgccaggcaccaggcatgacaagcctcactcgtctcagagatggtgagggaaggacagggttgggccagcccctgctccgagctgtcctgaggtgtcttccttggaccacatgcccctttccaggcaaaggccactatcctggacctccagtcccttcctcctggtcccccgttccctccccaccgcaccttcctgcttttctgggccgggcccacagcttcctgggtgatgaagagctgtgttctctcctgcccccaccagcccgaggtcctccaggctctgtaaagacttgtcctgactgtttctgctctctgggttgttggtggctgccccagtggtgtgcagaaggggaggaggacaggaaggggccctgcttgggactccccaaccctcctctgtgccctgcaggctcctccatgcaactgcacccccacagcccatttcctctgcaggggaggccccgtgagggcaggagggggcaggaaccgtgttgtgtgaccatggcacctctggtacctgacacagtgttgggcacacatgtgggaacctgctggcattcactgaatgaacggtgccctctgtgccaggccccccaccaggtgctgggggtactgtctgtgcaaggtggtccttatcagggaacaggagtgtgtggggcgtgcagtgatggcgggagtgcatccttgccaaggatggctgaaatgcagtggcgcaatctcggctcactgcaacctccgcctccctggttcaagcaattatcttgcctcagtctcccaagtagctgggattacaggtgcccaccaccacacccagctaatttttgtatttttagtagagacggggtttcaccacgttggccgggctgctctcaaactcctgactacaagagatctgcctgcctcggcctcccaaaattctgagattacaggcgtgagcccccatgcccggccaggactggtcagttttaaaatgtggacattactgggcctgtccccacacatgtcacaccccagcatggaccccacagggcactggggaaggcaccgtgggtgccttcgtgtagcccagagtgaaggggccgctcgaccgggaggggttgctgggtggccaggctgtgcaggcttttctctccggagtcccgggggacttcctggcagcccctgatccccactcccctggcctccaggtgggtcctgtatgaggagcccaactaccacggccgcatgtacgtggtggagagtggcgacttccgcagcttctcggactgggaggcccacagcgcacgagtgcagtcgctccacaaggtggtcaacttcttccagccgagccctcccaccgggatggccgggcgcagctctggggacaggggcaaccccttgcggtcccacccagacctcgggaccttgggcgataaaagtcctcaaagccaacgggcggcttctgagtgctctctcggcagtgggcatcccagccctgggaggagctggatgatccagggcgctttcccggactcccagggaccccctgggccagggaggggagagtggtggggagaggtggtgagaagcaatggggatggggcagggccggaacccaggccggttcaggactccccaggctcgcttggggctctgcctctctgtgactcggcaaggtgaggctgccaggccatgtggccaaaggcctgacccagggtctctgtgtctgatctctgggttttatcctcatggctaatcttggcctcggagtttctaagggagacccctctggaaggatggtttcgacccagggcagacccctctcctgcgagagagaaaacagttagtggtggtgagtgtcagggtgggggcttagcttgaacaggtgggctctgtgggaatggaggggctttcggggagaaaggggcatggggcgtgtctgctgcagccatagcccctggagcagtagggctggcagacccagaaccggcggctcgcgtcttcagctggtgcagcaccaagcgctcgcctgtagaattcctccattcctgggccctctccaggacactgggtcctcctgttggggtgggcttgaatctagaggggacaccccacccttgaggggcagaggggagggagaagtctgtcctggaaggagatactcggcccaggcagtgggattcctgggcataagaggtccacgtccccaaaagcatccccccactccctccccacccacgcctatgcttccaactcactggggagagaggaaaggtcccacgaggggaactctggtccctgggggtggcccaggtaactccctgctgccggcagccctccagcagagtcctgaatggagcctgcctgtgaggaaaccatagcccaccccagaaggaggcaacagatggagtgctctgggcttctgaggagaacacaggggccctggacccgagattcctgagcatgggggctcctggacatggagaccccaaagatgtccacatggcctgtgcctggaccaaggcctggctggatgagggatcagtggggggccaggtgcatgggttggatcacccgtgtgcccacagagttctggctgtggatctgactcctggtccagcctctaatccccgactgcgatcccagagtccccccaaccaactggctcccgactggcctctcagttcccgggtcctcctcaccatacatcttactccagttttctgagtagatggaggggtttggactggggatcagcccctctaggctggtcgcccagctcaggactccgagggaaagcccatgagccctgggttactatctgagttgaactgagacaccccgacaggcctagggggtgatggagtacggcagggagctcagcgagggaacacagggttcccgagagaaaaacaaaatctcaggggctgattctgtcgcacagtgtggtggcctgagtgtggtgggccaggggatggctgtcccgttcctgggtgtcctccaacctctccccatccctcactgagagagcaatggaaaaagagtcacgatgggtcacccaattcacccaagacaattccccaccaagagctgggtggcaaagacggaggggccccatgactgctgtgggacccccgtaggctgtcccatgacagccgaggccaaatgaagacatgaaaccactaggcaaccgtccactccgcccaggaaaggggaaggggctccctgctgccatgtggtagatgggtccccaaaaggcctgctctgtacccctaatgccctggccccacctcctttcacctgcaaaccacagagcatggagccctagaagcttcggagctgaggacttccagctgagcagctctcttcaatcagatcaaggaccggaagaggccaccacaaaaccagcaacaacccagccacctttcctgactgcaaacctctgagcctggaaccgattgacatgtaaatgcacctgcaccgtttctgagccgggagagtgtttacttaaaatcatgccctcagttttcatttctctgccagtttgttagggaggtggagccttctgtgtgtcatatctgccagcgggaggccctccccacccatggcaagggccctgtctcttctgaaacagccgtccaaccctccaccccacagcctccttgggccttggcaccctgctggcctcaggcctccacaatctcgcacctcagcccacagctgatgatggtgatgatgttgatgaatatttatggagcactgacttaatgccaggctctgtagtagctggaatctgtgtaattttacttatcatatacaataatgccaagatgatatgcttatcaccactgtacagttgaggagagccagccacagacaggttaagcaacttgcccagggtcacacagcagtcaggactaaaacccaggtctggctggctgattgatccttttcgttcctaaccactcctctatagagcaccacacatttgcatatttagatatatttttgtcatgaatttggcgcaaacccaaagcctctccaggcctcagaccctgttctgtgaaatgagtgcaatcatgtctgctgtaccaactgtatacccttgtaaaagccaaaggcgtgacccatgagcgggtgccatatgagggctggttagtagtaggtgacccagtaggtgacggggtggggaagcaggcaggggagtggcatcacaggagagaaggtaacttggctccaaactccaacctgattcccactccatccctcactaggatgtgacattggagaagccactgctgtgtgtctcagtgtcttcagacgtacagcagtggtaatcattccgccccctcataggcaattaatgcctggggaatgaaatgagaactgcaggccccaccggttcagtccaggtccttgggagtcacgggaaaaaccaggcctagcagcccttcccatgagttccagaggcttcccctgaactcttcctctcctccccagcaccaaggcttagcagcatctcattaactggtgatttaatgcttctcgaatgggctttgtgctcctgggtgacctccccctcaccccagccccctgctccctaatctgtcagcaaatctgctttttgtctgaaagaggaaaaacaagattcccaccaaagtgcttgtgggcagcttgtaatttatctgaagtccgtccaggggtcgatggaccgagggtgagaggccctcaagagccacacatgcttcacatatttctacctccctctgtggtttggaaagctgggactttcacagagccatcccctcatgtcctcagccctaggtccccctgccctgctggccccccgtgcactgtttatcaggcccagtctgaccacaggaaaaacattccctttgaatccccccagccaccccatcccccgcaccaagaagttcctctcaccagccaagggctggtccaagaagtctctgttggccccttccccttcctgggcctccctcccatgccccgaggtggcctgcgcctggcaggctaccgccttcttggctggaggcttcttggctcacctcttcaccccactgggtgccttaagagcagggctgtcctgcctgtgttccccccaggaagccacaacagatcttcaatcaaagcctgttggatgagtttgagcccagggacgtcaaaaaaaaaaaaaaaaaaagaagaaagaaaaagacaaactaacaaaaaacttgtcaaatgagacagttttaaaggtttagctccagagtttcagtttgtgaagatgacagacttctggagacagacagatggtgctgacggccgcacgactatgtgtgtgtacttaatgccactcaaccacacacttcaaatggttaggatgataaattgtatgtgtattttgccataatcaaaaaaaattaactccttgttgctgaggtgctcaggactgttgggggcaatgtgggaatgaaggccctcgctggatcccagggaaccctgtgggtctcctgtgcgaccatgccccacattccctacctgaagaagctatcacctgcttattgattgcgtgggtcccatcggcttggcagggctcttggctgtggctgctggggaggctgagatgcaggaggaggaagaggaggaggaggagaaggtccttgtccttcagcagggatccctggagcgtccctgtggttacctgggactaaccctgccttccggacccccaggacttagtagcccaggtctggggacaccaggaaggggtgacttgggcagcctgccctgaacagcgagcatttgtgtgaacaggctcctggcttccttgcctgtggacagcccgctttggaattgtgatttaaaaggatcctgtggaacccagctggcgtgggctgtgcatggaggggtggaagccctggacccagccttgctggggctgggggatggactgggcaggtcagtgctggtaacgctagtcctggtccatgcctgccctgggacccccaggactgccctccctgggtaggggcaggggcaggggcagagggtagggctgggctgagggtgcgcattctcatcccgaagagggctcagcgatgtgtaggattgctctggctagggggctgagcaggttataaggaccctctccacgaaccctgcctggcccccaacaccaagagcgggagttctcaccagttgggctggatcgttccgcgggctgagatggtcgtgccctgggttccattcccgtaaagtgttcatttctaggtgccaggcacagggagcagggcggcatgtcccccgcacagtgtgcccagcctaagcaccagccctggcattcctaaactgcacagacagacatgcgggcagtagaaatgggcgctcccacccagtggggctgctgggtagaagtcccttcatggggctggtgatggccgaggtggtgtcacctctacacacagaggggacgctcaagtgttgctttatccttggaggcactgggcccaaggccaggggaggagcccattgtgataaaaacgcagatacaaaaagtaggggaagaaatctttgcggcagaggggacttagaaaaatgttgtagaaaaaagcgaggcatccataatattctccccgccacaagtcctgtgctgtctgctagagaggaactgctaattgggccaaagcaagcagggaaacaggatcagctccatcattcgctcagtcccaaagatgaaaggaagctagttttccggaagaagcccagcaattcctgggaccgaggccagagagaagtttcttccacgggtcctctggccccatgccgatgactcacaagctgcaccctcaacgttagccctcctgcggggaaattaacaggtttcctaggattttctgtaatagcatcccacaggattcggtggacggcactgtgccaaagtcaactttttgtgggggaggagattttaacatttctggtttacgtatgagtatattgctacttttaagtgaacctaattgggtcatgaaagcgggacctggcaatgaccggttatcagtagataccaataccaacagcattttcttgggtaattactatgacacaaactgtgtgctaacccattttttacatataacaaggtgggtatattattttctctcttttacaatggaagaaatagacctaaaaggatgattgtaacttgcccaaatgtgtgccataaatggccaaaaaggccaagtgcccctggccgtctgaccccagcccacacctaaccccctctacacatcatcccctgtggcaacggcttcccaatctttttgactgagactcacatgtaggtcattagatataaaactaacacagctgtgtcacaaatagtcccgatcctcactatttagttgagcatcaatattttctattttattttactttaaaagaatgctggtcagagacccactaagttgatttcgcaacctcctagtaggtcacaattctccagtttgaaaaacactacaccactgcctcatagtgtaaacaaacgaagatttaaggagccacagcctacgctgtggattagctcttccaatcccagtgccctcctccctcccttgcctgccttcactaaagcatccagaaaagccaaatgctcttttctctgcctcccaggccatgggacatagctctggtcactgagatgaaagctgacagaaggacttcagaaaaagctttggctttctggataaaaagcccctttcccctggcttcctgccttgaataaagatgtgacgccaggaactcaggcagccttcttgtaatcatgagataaaagccaagagaaccagggaaaggctggcaccaagctcacagagctgctaaatcagcatcagcagccacccttcttgttatgtaagagaagtgaacccctatttgtttcaccacacgtaggttttctattatttgcagctgaaaacattcctaactaataacataataaccaaaaacccccaaacctcaaacaggtaggtcctcctgtgttaaaccctgtgcttcattgtctggtgagcaataaaggcacttgcacttggaaatactaaaatagattttaaaaaaccaacctattaaatagttcatctatttaaggtcgtagttcgttttttcccaattagaggcactgcctgccctgtggcatatattcaatggccacggtatcctgaccgtggctaatttttgtatttttagtagagatggggtttcaccatgttggccaggctgatctcgaactcctgacctcaagtgatctgcctgcctccgcttcccaaagtgctgggattacaggtgtgagccaccacgcctggcctatttgtttctgtcatggagcaaacccagattctttggaagagagttttgtgggatgtggaaatggaaaacaattgcatgggaatgccacattcggtgtggggcctttatgaagaaacatgtgaaaggtttccagaagagaaggcaacatgattcacgttggaaactgcagggctgtggtttagattagagagagaaggggccgggtgtctggctgctgtaacaagtctctatgttaatttccaagtgcatccctatcttcatttatgtttgatggttacctgtcaggtgagcagaataagtcttgttgttcctggttaatgaaaaaggaatcgagaccctgagaggtagaggggtttgcctgtgtttacatcgtaggtctccatggagcagtccagacctcttcccagaactcatgctggccttgctacccagaattcctgcctttagggaatgacccttcccctggccctgccttggttctggtgtgtgtgcctcaccctcaatgccctgccacatgtgggctgggccagtcagatgcactcctgggaatttgaatcttacacagagacacagaggaacccaaggtggatagaggcttgagccgagtccgtttctgttacctgcacaccaaaaaccctaactgacagaaatttctactagacagaaggttgaaggccacaggccagcagaaaaatgtaggatatttggaattagttattgggatctagatgagtagagagtagttaaactcccatttacattctggtgtggatggcattatgggttgacaccataacttatacattgaagtcctaacccccagcacctcagaatgggactgtcttgcaatgcacttagttaagttaggatgaggtgtgtcttagtctttcaaactatcgtaacaaaataccagagactggatggcttaaacacagaaatgtatttcctcatagctctgaaaattgggaattccaagctcagggtgctggccaacttggttcctggtgacgggcccccttcctaacttgcagttggctactttttcgctgtgtcctcacacggcagaaggagcacaagatctctctcttcttcttatgagattaggtctccacccttatgatctcatttaagtttaattagctgataaagccctatgttcaaatacagtcacattggagtttgagctcggatacatcaattttgggggtgcacagttcagtccacatcaagatcctactagagtagggtgggcccctgatccatcatgactggtgtcctcataaaaaggggaaatttaattagatgggcgtggtgggaggcacctgtaatcccagctactcgggaggctgaggcagcagaattgcttgaacccaggaagcggaggttgtagtgagccaagatcaccattgcaccgacaacagagcaagactctgtctcaaaaaaaaaaagggggggcgggatttagagacagacacacacacagggagaccaccatgtgaagataaaggcagagacccaggtgatgcttctgtgagccaaggaaccccaaagacggccagcaaaccgccagaagctgggagggaggcctggaacagattccttgaagcctcggagggacccaaccctactgacaccttcatttatttccgacgtccagcatccagaactgtaagacagcacatttctgttgtttgagccattcaatttgtggtactttgttatgacagaaatgaaaggggagagctgcctgtggtacagacgggccacatgcctagtcaggccaccctccgtggccagctggaaccaggtgtgcacttgtaatgcccaaccttgtttttactaaccctgtttttagactctccctcttccctttaatcacctagccttggttccacctgaattgactctcccttagctaagagagccagacagactccatcttggctctttcactggcagccccttcctcaaggacttaactcgtgcaagctgactcccagcacatccaagaatgcaattaactgataagatactgtggcaagctatatccgcagttcccaggaattcgtctgattgataacgcccaaaaagccccgcttctaacaccttataatagtcttaaagcctctacacctggaactgtttactttcctgtaaccatttatccttttaagttttttgcctactttatttctgtaaaattgttttaattagaccccctcccctttctaaaccaaagcataaaagaaaatctagtcccttcttcagggccaagagaactttgagcattagctgtctcttgaccaccggctaaataaacggactcttaattcatctcaaagtgtggcattttctctaactcgctcaggtacaacacactgaggcagggttttgagggtcgtacagttgctgttgcaacataattttaaaagaatgcagaacgcagctgacatgtagttgcctctgacagcactggatatttggatgcacatcaagattaaatccgacaaagctcctctcaaggtggagagcagaactcaaggccttcctgtgaccagtctaaaatctcattagggacagagtttggagacgaatcctgtaggttgctaaatgaaaacgttagttgtctgcatgaacttcccagagatttgatgtgaaatttaaagcactaacacaaaaagaatgagacaccaaccattggaacggggatatttgggagtatttggaaaactagaacctccagatcccccaagtcctttaaaacaccccccactatgttcctcttacctgagaaagatgctcctcttttgaaggagagaattaagagttcccttcacagcccactatgtagcgttgcttgccccataacaggagttcagcatgtgtggcttagactagagggagaagtacagagagacctagagaaactgccagaggtcactcatccacattgccagaagtctggagaatgtttgtgggaatggatttttgagggttcttggccaaagagggaagaactggattctggcttgcaccaagggtattgataagacaattctgcattctgtgtactggcttagggggtgctgtccatgtcctaacaacctgctgatgcaaagttgatggtgttgaagtggcgcagaaaggctaggaacccttggcataagagagggactggttctgagctgtgggagacaagatgctgaaatagatccttttgtgtgtttccaccccacccaccccttgggatggacctcaggatggaatcaggcgactcctccaccctcagccttgccacaaagagtaaactgccatggattgttaatgggagggacagtgatagaagggggatccccaatctctgaggggtgagaggagcactgggagctggaggtcttcactccggaagtgcactgggtagggctaagtggagcctggatctcagggagtcgtctcaccttccaaaatctcaggtcatggatgattgacaggtatcccccaaattaagtcggtaatcaatccactcatgtccccctttttttgtagactcaggaaggttgcaagaggcccaagtagaaccagcatgctagagaaccatggcctgttatcaaattcccagacccgggtcagcccacagacctggcaccctttgaatgtgaaggccaggcatccttgaagagggcagctgctataatatcacatgtgtattctgactttttttttttggggggggacagagtctcactctgttgcccaggttggaatgcagtggtgcaatcttggctcactgcaacctctgcctcttgggttcaagcgattctcctgcctcagcctcctgagtagctgggattacaggtacatgccactgtgctggctaatttttgaatttttagtagagatggggtttcaccatgttggccaggctggtcttgaacttctgacctcctgtgatctacctgcctcagcctcccaaatgctgggattacaggcgtgggccaccatgcccagcctttctgtgacttaactttaaaaactctgacctttgagccaggtgggtgctcatgtctatagtcccagctactcgagaagctgtggtgggaggactggttgagcccaagagtccgaggctgcaatgagctatgatcataccagtgcactccaaccagggtgaaagagtgagactccatctcttaaaaaagaaaaggtaaggtatttaagccttctctccttggaattaaacttggtgcaaaagcacactgggaaaaagcaggctggagccaagtccacttgcagcaacatcgtggagatgattccacaaggcccagctgccgagctccctggcatctccctagtgcttatccttcaaatctggatatttatctctatcttctcttgctctcttttcaataaatccatttttcttgcttaaactcactaaactcatttatttcaccgcaaccagagaatctggatggttcccactttctccctttttctgctcccagcaacataaaggcgggtgtggagtggatggccccaccagccctggctcccactaggaaggacactgaactcacacaaaataccctttgtaggattagcaaccccagcactccttaagctgggcttcagaatccacacaaagaataagcaaaggcataattttgtgggcagttagaaatcctatggagtgagtggaaacagacattcctgcatggggctccctcctcgtccctcccagtcacacacacactctaaccacggtgccttactgtggcagataagaacaaaagcccctttcaagacatgtggtgcctatgtgcagaaggtctgagatctccatctgggctgggagaactgtgccaggtgccaagagccttgccgtggcttgcttgtctcggtcctcagaaatgcactgagaatggaggaagcggtcaaggaagggtcttccaagtcctttggattttctccttaacatctggtatctcccaggtctgaggctggaaggatttgtgatatttttcccattctgtgggttgatttttcactttcttgatagcatactttgaagcacaagagcttttcattttgatgaagtctgattttttttccttgtttgcttattctctaggtgtatctaagaagtcattgcctaatccaagattaagaaaacttacacctgtgttttcttctaaaagcattagagctttagctcgtacatttaggtctttgattcatttttagttaatttttctatatggtatgaggtagaggcccaaatgtatcctgcatatggctatccagtggtcccagcagcattttttgtaaagattactctttcccctgctgaatggtccatacatgtctgggctctcaattctattctattaatctatatgcctatcctcatgccatacattgattgacttttggatgttaaaccaaccttgaattcctgggataaaccttggttaccatgttttattgtttttatacattcttgaactcaattgctaaaatttttaaaagaatttttgcatctatgctcatgataaatattggtgtgtaattttcttatttctatttttatttattttattttattttattttattttattttattttattttattttattttattttttgagatggagtcttgctctgtcgcccaggctggagtgcagtggcacgatctcagctcactgcaagctctgcctcccgggttcaggccattctcctgcctcagcctctggagtagctgggactacaggcatctgccaccacgcccgactaattttttgtatttttagtagagacggggtttcaccgtgttagccaggatggtctcgatttcctgacctcgtgatccacccgcctcagcctcccaaagtgctaggattacaggcgtgagccaccacacccggactttatttattttttgagacagggttttgctctgtcacccaagctggaatgcagtggtgcgatcacaactcactgcagcctcaacctcccaggctcaagtgatcctcccacctcagtctcccaagcagctgaaactacaggaacatgccaccatgccagctgattttttaaaatgttaatacagatgaggtcttgctgtgttgctcaggctggtctcaaattcctggactcaagtgatcttcctgccctggcctcccaaagtggtgggattacaggcatgagtcacggtgtccagcctataattttctttacaaataatgtctctgattttggtatcagggtaataccagcctcatggaataaattgagaagtgttcccacctcttcagttttctgggaaattttgtgga

SEQ ID NO: 952 - DNA, 697 bp, Homo sapiens
atcactctctatgaaggcaagcacttcacagggcagaagctggaggtcttcggggactgtgacaacttccaggaccggggctttatgaaccgagtgaactccatccacgtggagagcggagcctgggtctgcttcaatcaccccgacttccggggccagcagttcatcttggagcacggcgactaccccgacttcttccgctggaacagccacagtgaccacatgggctcctgtcggcctgtaggaatgcacggagaacatttccgcctagaaatcttcgagggttgcaacttcacgggccagtgcctggagttcctggaggacagccccttcctccagagcaggggctgggtcaagaactgtgtgaacaccatcaaggtgtacggggacggagcgtgggtcctgtatgaggagcccaactaccacggccgcatgtacgtggtggagagtggcgacttccgcagcttctcggactgggaggcccacagcgcacgagtgcagtcgctccacaagctcattaactggtgatttaatgcttctcgaatgggctttgtgctcctgggtgacctccccctcaccccagccccctgctccctaatctgtcagcaaatctgctttttgtctgaaagaggaaaaacaagattcccaccaaagtgcttgtgggcagcttgtaatttatctgaagtccgtccagggg

SEQ ID NO: 953 - protein, 167 aa, Homo sapiens
KHFTGQKLEVFGDCDNFQDRGFMNRVNSIHVESGAWVCFNHPDFRGQQFIHGDYPDFFRWNSHSDHMGSCRPVGMHGEHFRLEIFEGCNFTGQCLEFLEDSPFLQSRGWVKNCVNTIKVYGDGAWVLYEEPNYHGRMYVVESGDFRSFSDWEAHSARVQSLHKLINW

SEQ ID NO: 954 - DNA, 135050 bp, Mus musculus
  misc_feature (1)...(135050): n = A,T,C or G
ggatgcacaaacagacccacatacatgtggaggattgattttttttttgacaatgatgctaagaacatttatagagggcagaaagtgtcgttcaacaagtggtggtgggacaattggataaccacatgaataaatcaattctgagtcaatccttgaaccatttattaaagaaattctccgtaatgaatgacagacatgtatgcaaaagcttaaagctgggaaacttacaagaggaaatggaaaaaaaagtggtgtggccttgggttaggcaaagatttctgagatacaatagcaaaagcataagatattgctaaaaaattaagtgacaagagactgggataaaaaaatcccattggtgtatgaatatgtaacgtaaatacataaaagtgaaaacatttgttgttcaataagaaaaccaagcaattagaaactggctcatgggttgaattaacctgaagataaatgagtaccaaagaagtgcctgaaaacagactacttattgatcacgcaaattaaaaattcaatgacatggcacacacctgttggcaagtcaaaaattaaacagagctggagagctggcacaggcagcgaaatgcttgctgtgtgggcacaagacctgagcccacaaccctagtactcacataaaaagccaggcatggtggtgtgtgtttggaactccagttctgagaggcagagtcaggacaaccattgggtctttctggatatctaaatgaattggtgagctccaggttcagtgagagaccctgcccaaaaagaggatggagagccatagaggaaggcatccaacatcgaacttagagcctacacacacacacacacacacacacacacacacacacacacacacacactaagtacacagacacaaatgtatacacacatatatcacacatatatacaatcatgaggacctcagtgtggttcccagcacccacataaaaaccagggttcagcacatctgtaattcagcacatctgtaattaattcagcactgacagaaacgtggatctctaggttcactgcctatctagtctagtctagttggtgtgccccaggtggcaataagagaccctatctcaaaaaccaagttggatggcccctacatacacactaacatgtacacatgtccatgcatgcacccaaaagagaaagaagaatgaaggagggagcaggtgctggcaggatctacagcctggagatgtaatctataagatccctctctctctctctctctctctctctctctctctctctctctnnnnnnnnnnnnnnnnnnnntcatttgtgattgactcaatgcagggctgatcaaactctaacaaagctatttgcaagactaccaagaaaattccaaaatgtatatggaagagcaaaggtttaagaatagctgccaggctctgagaaaatgaacaagttggggacatgcggtcatgggtgggtgtgaccgtgtggcaagagacagagtagacgaatgacaggagacaaacagaattgtgtgagagggactcagtgtgtatcacagtctggacacgagatggagttgtacatgctgacactgttgttaatttcttccagtgaagacacactcacactggcctcacaaacctcagttctgagccagggagctggatcagcaggtaagggtgctggctgcggaagcttggaaactcgagtttaatccctggaacccaggtatagtggctgttcctggtggtcaacttaactatatctggaatgaactacaatccagaattggaaggctcaccagtgaccctaatctggaggctgggagatagaagtttctgccctggatcttggtatggagatcttgaggcatagtggctatggattccagaagattaagacagggagatctccgagttcaaggtcatctgggattaaaggtgtggtggaacacacctttaatctgggttacaccttctgctggagaccatataaggacattggaagaagggagtctcactctcgcttcttcacctgcttgcctgtgggactgagtaactgctagatccttggacttccattcacagctactactgaaccattgttgggaattgggctgcagactgtaagtcatcaataaattcctttactatatagagagactatccataagttctgtgactctagagaaccctgactaatacaccatataaagtcagaaagagagatctgactccacaatgttgtcctctgacctatacacatgcgttgtcacacacatatacccacacacacacacaccacaccacacacacacacatacatacacacaccacacatgcacacacacaaacacacacacatacacacactgatgaataaaaatgtgtcaaaccctcagtgccatgaccattaatctttgagatgaaaaaaataaaacaaaacttgaaagcaccctgagggaatatgggcgtatattaatgttattgcttcaagattgagaacatattaaaacacagaatctcagatcagagaaaatcgttgcaagcatggactacattgaaggcactgttttcattcacacagaggaacccataaggatatgggagaagacatgtgtggagcagatctcagcccagcactggcatccagaaggtgtgggggatacaattggaggacggcaaacatttcctccaaagctgctacgtgataaactgccatgcctgtcttggagggctttttgtacagtgaagttgatgatgttcatagccctgtggactggacagcccttccactcatgtaacagacacacttaatcatggttccccttgggggcaacttgatctcctgtaaagatacagtgttgatatatcacatggggaagacacttggcacttctggggtggaggctgaagatgctgccatgccttgttggtgtacgacccctgctcaagaacctgcctctaaggtcaagtgtcctgctctagaggaccatggtcagaaactcaaatgtttaagttgccttgttcaaaatgatgtctttcctatccacagggaccaacaaaattatggattttaaaagatcattatcaagttaaaagtttaaaaaatggattctgtttatagccacaactctccacacatggaatgagaaagataacacactaaggagagaggcacagggatggggcctatggtgtatgtgaatgccggtcccttaattcgtagtctatatgcttgaatgcactaagatctataagagaaggtaaatttacagtcatgtccctgccttgcccctgttctcatgaagggcaatgggagctccctgctgtgaggggcagagacagaaggataacaatttcttcagggctgccttgggtccatacctgatgacttgtatagtatgatctcaccgtctttggcttcattatttttactttcaaggcagaactgactttattggaagccttttacccgcctttggagaaggtgttggtgacatgtctttcctggtatttctgcaatatgccacatggtaggaaacttttccacataaagaattatgggattgcctttgtcacccaactgtttatatatatatattagattttagttattagaagatttattattttattttatgtatatgagtgttttgcctgacagtatctctgtgcaccacatgtgtcctggttcatacggaggtcagaagagggtggcaggttctattccttcgagctgcagttaggaatggttgtgagttgccatgtggacacaagtctgaacccagatcttcggcaagagcagcaggtgctcttagccacggagtcacctctcctgccatccctgccccctctaaatacatgagggtctattgctctctgaggtcagaagagggcatcagatcccctggaactagaattacagatggttgtgagtcaccatgtgggtgtcaggaattgtacctgggtcctctgcaagagcagaaaggaaggaagacagaccctccttctcggaggaattctaccaagaactagcccagagctgcactccccacttctttctcagtgtttttcctctgcttagagttcctgacttcttgcctgtttgcatgcagcctgtctattttatatatccggtctgtctgtcctaagctgccttcttgtgactgtctgaacaaaaggtttcatttctgtatttattgataacacagaaaacatgatatgaaagaacaatgaaaatgaggaattctttacagaaatctttaacagggttttacaaagcaagaagtaacttggttaactcagttaaccctgagaagaactcagaactgcaaacagatattatcaacctgtatctaaacatttgtgggacattggttaaggttgctttcaatgtattggctgcttcccgaaaacgatgaccacaacacacaagtaacacatatacattgttctggggatggaagagtatgtaagataaaattaaagctatgattggtttagcttgtagaagggatagtcagtttggttacattgttcccttcaagggaggttaatcttaacatctaagcacacaatagcagagcaggttaagtcttgagccatctcaaggcataacattaatttggatgcaaggtccagtgaaagttcagtctcttttaaggcaaaagatagttttagaaaatgtgtcactacagactgcacagtaagtttaaagccagcctggaatacgcaaggcactatttcaaaataacttacagggacagacaaccctttcctggtgacactgcagcacacagtgacatgggttgatggtgggaactaggaaagcaagagggacatggtacagggtcctaggaacagctattaagaacaaacttcgccgggcagtggtggcgcatgcctttaatgccagcactcgggaggcagaggcaggcggatttctgaatttgaggccagcctggtctacaaagtgagttccaggacagccagggctataccctgtctcaaaacaaaacaaaacaaaacaaaacaaaacaaaacaaaaccaaagaacaaaatctctacctagaagctgacagctgtctctaggaagacgttcccctgaaacagaaattctggcatgtatggaagagtgtttcctgtcattgaccctggctggcagcagtgaagatgctggcgtccaagaggaagtgctcagtagtgcggagcacagcccatcggaagatgaattagagaccctacagcactggagggaatttcctaaggtgctgatgtgtgtgcagagggagaaccagaacaatacggctaatgtctcagcattagaggacttacctggcctatctgacattcaagttcccccagtactgacaacaaacccaaaactagccaggctgtggaggtgagtcacctgcagggtgtgatgggagagtctgtacttcacagaaagttctgtgcatgtgtttgcatacaaggagagtcactgagccaaggtcaccaagtgtttgtgaacttatcctgggaggtaagattgaaggaggccttcatgttcctttccataattgcctgcgctgtttaaatcttttcacgagactcatagaaagcaagcagtacccattcaaaggcaagaacccaggaagcattgtcctggcagaggaacctgcagctgtcagcatgtagccacatggcccggctctgagggtcaagctaggctcacacactcctgaggctaacactcctaagttttggaggagagcctgtatccccctaaccacacctccctgctccaggggggtggggggagccaaaacccctctgtgcagaacaagaacctccgtgaacaaccttcaaggttatcaaaggatgatcgattcttttaaaagcccattctattttgaggtaattgcagagttgcccacagttaccaggcactttctggttctccggatcctctgaactccttctcccatggaagtcacacagtggccctctgaacttttcataaggtacctctctgttgggaacactttgagtgttactgggtgtggctgagccttagactttagggttgaatgccatacaatacatggccaggggtgcagttttagatactaggtgtgtcctcaggtgcttgctccctggatccagcttcctgtcctttactaggatagcacagtggcaccttcctcaccaggtctaactgagggttatgcagcagccacacagtggcaccggggtaaattcaccttcaagcttgagaggttaagcatttaccccttctgacacctgggatggctctcatcgctttgtgtttgcagtattgtgtgagcttcattgcctgttgttgtgatggaaaatacccggggcaggatcagcaggtagtcaccgtgtgaatgtaggatcagcaggcttcagagagcacagcagagccatggtctgccacagggacctgggggagcttggacacttgagttctttcttcctaggtggcagggatgggaagtgctgggctgctcacattctgcttgcatctattagatgcttctcctcatgagagttaaaagccactcaggccgtcacatgctcactagcccatcactctggaggctggggcagggggactgacatgaattctaatctagatgcaagaagaatatttattttgaataatttggggtcagagagatggttcagtgtgtaaaataaaagcacctgacacttggtctgatgatatgagttcaatcctcagaacgcatactgtaaaaggaaagaaccaactctcatggtagtaccacacacacacacacacacacacacacacacacacacacagagttaaatttttatttagaataacaagatacaacaaataactttaccctaagcattcagtcttcaagtcttccctagctttcaagcaatcttgaaaatgtgcacgtccctcgtaatgagtctgagtcaggagaaccttcctatctacatccaagtttcctctactggagcctggtggtggtggctgtggcacacaccttaatctaagcagaggcaggtagatctttctgagttctaagacagccctgtctataaagtgagttccaggatggccagggctacacacaaagacaaactctgtctcaagaaaacaaaacaacaaacaacaacaaaaaccaacaaaatttttctctactcttattatagaactctaaatgatctatttctatgatttctgcatagaaaaatgttaccaaatcattatcccatgaagtcactcaaaacagataaagaaggatgagaaggaagaggaggaggaggaagaggaagaggaagaggaagaggaagaggaagggaaaccaaccaaaagatacttctataatagtggctggctgtcagctaagtaattaattcaattaatactggttttctgagtcttgtgtcttgttatgtttatggcttctagctgcatgaaacaaaatttgttgtatttcgttattctaaataaaaatagaatacatgtagcacgtagagacatacatacatgtgtatgtctctacatgtgtctatgaatctataatgtatgtgtctgtgtttgtatgtgtagtctctctctctctctctctctctctctctgagtgtgtgtgtgtgtctgtgtcagaaccactgtgggagttggctttctcctttcatcatgtgggtctcaggtcatcagacccagtgacaggtgttttactcactgaaccatctctatggctccattagaaaaaaaacattatcttttgcacagaactttgtaattcttattcttcttaaggagggctcctgatttcagaagctctgggcatcatgaaactcacacaccacacagacatccgttcacaatctactcttcttctcttacccattatcagaaccctgtgccattgttttttatcatgcatctgaaaaaaaaaaaaacaacaaaaaacctcgtttccttaaatcaaaaagaaatcctcctctggagtcagaggggttgtgcaatgatgttttggccaaacatattaaataggatcctccagaggagtttccagaaaggctgttgcaaggagctgtgggatgtgtcctgtgcattttgaatctctctctccagtctggaatgaagacaggatacaggaagatgggtgtcaccttgccaccttgaagataacatgaggaaggaaatcccatgttgaggaggggaggacaggggaaagggagggctcgcttgccttgggtttcttaagtgaggaaaagcatactgtagaacaggcttcagataacttgtggccaaaggcaatctgtaactgatacacatgtatcgaatcagggcaaactcagtggccctagtaacagaaacttactatttttgttctaagctagaatggctacctcaagccattcaagcccctctgcagttctcagaagcctccctctgctccttccccaagttgatgtttggtgttcctgcgatgccttcaggttcaccaactatgtcctttctgggcacttccctgcacccattttcataggaacaggagtcagactggatgaggggccaggctactccaggataacctcatcttaattaatgagacttgtcaaggtcttatttctaaagaaggtcatattgtgaaggagagagagagagagagagagagagagagagagagagggtagggggtggggggcagactctgatcattcccgaaacacctcattcctgttcttctttcctggctgtgttcctatgacatcacccttcctgtcgttcctgttgctaccaggtccccattttggaccatgctctctttacacctggtccgttgctgttaatgacatccttggagtccctcacattctgggtcttcccccttcagttctgggaaggtctgtcctctctaaagtcaggcagaaccatgtgtcttacattggccaatgaagtgcaaaagcatgcggtgcttttaaggtgggagggttggtttgacaaactcctgtatcaggccacctttcctttacactgctctgcaaattgtgctccttctgacccagtctcataagcctgacctgtgacagctgtccatcagtagagcctccgctgattcaagcaggatgaagagtgcaggcaggaaacaagccagtgagattccggctcgtttgttaccgcagctcagcagagtttatcctgactggtatatttaaaaagtgtgaatctgatagtagtttttcccaaggtgagacaagcttccgggtaatctccaaaggctttctcgtagcccataagacttcgtggtactggcctctgcccattccttctttcttacctttccagtcttctctctgccttgagacagtcttttttagactgtcaaatatgccccattgtcattaaactattccctgggcatggatgctcttctccatttttgcttgtttgtccattacgttgtccttagatcttagggacagcacagtaggtcctcaatacatatctgtagacctatactaaaccaatggatctctgcctagctaaaccctatctttctgcaagaccccggttgccatcgcattgtcatgaagtaggtgcggttttactcaatgatggagacgtcagaatcgttggaatcccgggtcttcctcttaccatttgtgaccttgaacatttcgctttaacctctgatcttcagatttcttatctgcacaatgtgggggtagacacccccgccatcgctgcatctttcccaggatggtcaccatcccgcggtgggcggcctctgtgggcagggagagcttcctaggcctgagaaggttccccccaactcccgttgcttctgcctgtgatggccggggggtctagactagcagcacccaggccttccccgcccagtgcgcacgctcgcctgagccgggagctgaccacctctaagggctttcgcccggggccgcgaggacaccacaccctccccaatgactggcgggagaaaacaccaatcggagggacgatgcgggagggggcggggccaatccgcgagccggcgcccggcgcccaccgatctgcagccgctagcgtgcggcgccggtccccgccgttcccgcatcgcacacgggttccccacgggccgagcctcctcggctacggtccaggttttctttattttcattttttgcatgcattcattttctgttctatctcgtccattttaaggcagcggcgacggcgacagcagcgtaggtgcgcgcggggagggggcggccggagaatgcggctccccgctgctgctcggcttgtgtcggagcgtcaagcaggtgggtacaggtgtgccacggaggaagggggtccgggacaccgcacccagtgggtgaaccctgcaacgaggacaccgctacctttgctgcctgtccgatccccacccccagcctccgcgcccctcacaaccgttcatcctacctccnnnnnnnnnnnnnnnnnnnnnnnnnnnnnnnnnnnnnnnnnnnnnnnnnnnnnnnnnnnnnnnnnnnnnnnnnnnnnnnnnnnnnnnnnnnnnnctcccccactctccccagctatcccccccccccatctttcctgtggtggcggcgctccccaacactggcccgttgcttccctgtgtcgctcacaccacatcgctttccactcgtctcgtccttacatcccggagtgaggagtgggaggggacccacccgagccccagcaagcggcgtaggggggcgtggttggccggcccgttccagtcctgagggtctctgcctaggtggagcccagagtatgtaggggtgacccggagtgggaggccgccctggtgatatcccaccccacgcactgcacacgctgcggctgccgggctacgcacaccctcgcgccgctccgcccacgtgtgcgccggggagaaggctggagcgctgcgaagaaaggctggtatccaccctgtgcccggcggcgcgccctgggcgcaccgcctttcggggcaggcgccgggatcagctccatggtgctgcccggttccatgtcgtgctcttggcgatcaggctggcgacctttcggcctccatttagggagctgcgctgtgctgcgtattcctagactttcagtccatcattccaccctcccagctgcgggattccaaggataagcctttttaggccactggccaggctggagcctttcgcttcccttcccgcaccaaggctctaccctagactttcctcggcgctttaagctcaaagatacaggtagctgatccgttcagcacctgccattagtgcacactctggccccctgaccttggccttttctgtgctgttcccattttgggcacgcccttccttcatctggccggctccttgtagaccaaagtaaagccgagctccttgccaatccgtgcttcctagtgtggcaggacgccaccccgccccctcgctctccccgccccccaggccttcgcagtaaattgctgtacctcccaaagccgaggaggagaggggatatctgatgccacctcctgtaacttgggagtctttgatgtgtgggcaaggctaggggaggagctggctgtttctccagatcagagggctggctgatgattgtcccatcaggtgggcaggccaagtggaagggacgggttctaagtgaggtgtggttggaaagctcattttgtgggttcatttgtgaagctgaggattgtcgcaaagtgctcattgagaccttgcttcaggtaggattgctgaggtctgcacgggagttgcagatagttctcatcacctgggccgtttcacaacatgaaattctcaaaaggtttgtggtcttgtagatgtcaagactgtcattccctgttttataagccatcttcagagtcccactgtctccgttgtgcagcaagttcctcactgttggtgtccctggcccacctgatcccttttcctgctgtcctgtctcggcaacttttgtgcttcatggtcttgtctgcacacaaattgggttttccctgccgttcctttaaaatactgtttccttcttgtctgtctgagaaattcctgttcatgtaataatgtaaccctgcaccggagttacattcttgtggctttctcttgatttgccaaactgtgactccctatgtgtaccccccagagcatcacacttgtgtgcaacagcaagatttatgtgggtctcccctcaggcagatctagcccactagggattctgggaactgagatgtctcaaaacctacctgcctcttggaattcggaaggcgttttctacctgggatttctgagtaagggtcctcctgtgaggactaagtattactgtggtccccattcgcttgagtgggtctcctcttccaggatgatagaatggccccactagaatctgtgccctgattcttattgctatgagagatctgggcaagagcactaacctctcgctcagtcttcattttctgtataaatgggggtcgggtggggtgggtggcagtgtccctcttttgctgggttgtctggggatcagagatgtggtcctcttactaaacgatcatgatgataagtctgtgctgagctgtgtccttcagctctgtggcagagcagacgcccttgctggaaactctcgtttgccatggggctaagctgatgatcctaagaagcagtcccgggtgaggtgagctcaggccccggtgtctctgtgtctctaggcaaggcactcagtctctgagctctgtgggagagagggttatataaagagaatagcttgcaccgatctgcctcccacttctgccttgagggctcttattttagccccatgccgtgcaggtacagatcacgtgatgaggacgagcagtttgctccagtagaggagcagaagatcagtgagctttcctctacctcaaatgctgccccatgtgtgaaaccctggcagtgtatcaccatcttcctgcagggctagaataaagcttaggtactgtccctctgctttctatggaaacatggcaccgtaatgacctcctagccactggggctgctatagttagaggctcagaaaaggatcctgggatggccagcaatcctccaactccaaagtgtcaaagaagtgctatctttgcttatgtggttccacaggtagctgaaggcagagaggacgcaggcagcatcggtacaggggtggggtaggggtagctctgggagcctgaactgagagtggagaaggcaggcgtctcataggaagtggacatgaggacagtgaggactctggagatgtaattggatgctgggtcaaaaccctggctgggggtctgaagagatatttcagcagttaaacgcatttgctactcctgaagaggacctgggttgagttcctagcacccatatgcagctcacaaccatctgcaactccaggtccaggaagttctatgccctttcttggcttctgcaggcactgggcatataaatggtgcataggtatacacacaggcaagatatttgtacacataaaataaaagtaatcttttagggacaaaccctagctagaagcagacaagaggtcagcattctgagggcaacccagaggaccagaatgatggatggcactctgctcttgcctctggcttgggcacaccttttctaaatttcccaagaagtgtgcttctcaagagctttcagagtggactggcagatgggtttggaacagtgtagcaaagctcttaccaagtgttagagttcacaccagggttggcagccagtacctgtgtcaatagttactggcacacaaccctgccctgctcttttgtgcaggatggtctgtggctgctttggcttggacccgggagagctggcatggtgggtggaggtggtcgctgccctgtggaccatgctgtctctgactctgaacttgttgagacccagagggagatctcttaagaaatggacactgagaggctcagcacagctggcgagtttgaaggcaggaagtcagtgttctttatttcttcatattttttccttggaactctatactttgattaccactcatttaattttaccacatttgtggggcatagggttcgatatatcttatatctaatgtcaaaatctgctgattaattcttaaaatattttacattaactgtatacttactatttaacaatggctatcccagcaatccttgttaagtgcacagtttgttgcattaagcacagttgcactaatctgtcaccatggctgtcatccatttccagaactttctattatcctaagctgcaggatgagttctttacggaccctcactgcccagtgcaaataccagcttcaggttcgtgccagtgttgctttttaccagttaactgtgcaaacaaacgtttgtgcccttcaggatcctctgcattttactttccttatttggtgagagtcaatggtcctcgtgtcatggattttgtcaacctgacatagacctagacacgctttagaaggggagtctgaattgaaggatttcgtctatcagattggtctctgggcatgtctgtggaggattcattgtcttgatggctaattgatgtggaagagcccagcccactgtgaactatgccactcctgggaagttgatagtaggttgtataagaaagcaggctgaataagccatggggaacaaaccagtaagcagcactccaatatgacctcagcttcagttcctgccttcaagtccttgtcttgaattcctgccctgacttcctgcagtgactgacagtaacctgtaacaactcccaccgtgcccaccttgaagttgttatgggtcaatattgtgtcacaccgacagaatgcaaactagaccagaaattggtaccaaggggtgttgctataattgacctgaccatgttgtttggggcaatgggagaaacatttgaagctttgggctagaaaagccatttgcgctcagagcttaatggtctattctgtgggagcttgtgggtgctgaaatctgtgcagacagtggaggcctgccttgtgaggcttcagaggaaaagtttgagagtccatcaaagacactgttggggccattttatgatagattttgagtggagactgtagtttctggtcaactgaggctgaagaatcaacagtgattaataagacaccagtatcactgagatcttctgggaggtgtctcctctgggtcagcacacagaagctgaggtccagaaggggccaaggctgcagctcaagctggccacagaagttggtgacgcataagagtcccttaggtagttctggatttgaaagcatgaaggggccatggagagcagctgaggcttggcactggagaggccaggccaggccaggccaccagtgaatgtatagcttcaaaagcagtgaaaccattaagattgatggtatcatggagagaagtttggaggccaagagaggccattggtgaaggtatggctgtgggcaccccaggatattagagatgttggaccctgggacatcctgcaaggacagtagtgggtgtgaagtgcagctggttagagctgacaaggcaagctacgggttctgtggatggcagaactgaaggggtggttacaaccaatcatttagagcccagaaaatcaagggtgagtccaagatggacatcgaacttttcccactgttgagtattggtttggttttgttttgcttgtaactgtggtctggtccttccctctcggaataaggaaacatggaacttgttttgggtttcacacaggcattcacagttaatagagttttggttttattctttatattttatgtgtgtgagtgttttgcctgcatgcatgtaagtgcactgtgtgtgtgtgtgtgtgtgtgtgtgtgtgtgtgtgtgtgtgtgtgtccttcagagatcaggaaagaactagttgcaaggtaagttggaaatagagttacagatggttgtgagccaccatgtgggtgctgggttacaaacccagatcctcagccagttctcttaaccactgagccatttctctagaccctggatttttatttataaaatttttgggtttattttatgtgtttgagtgttttgcctgtatgcacatatgtatgtatatgttatggatggttgtgagacattaggtaagtgctgggaaccgaacgttggtcttctgcaagagctccagtgctcttaactgctgagccatctcagaagccctgatgttggatttaaaaagaaatcatggactttaaaatcattgacaattttctttttaaagagtagaacttttaaaattggactgtcttttatattgtgatagtaacatgagatcttagggccaaggaatgaaagagtatggcttgaagtgatatatttgtgtctcaatttcactcagggtagaatgccatactatttttttaatgacattatttatttgttgaggggagagtacctgctacagctgtgtggatgtgagaggacaacatgtgagcgttggttctctccttccactgtgtggcacctggggatggaactcagaccattaggcctggccacaaagtacttttatctgttgagccatttctcatactttgctttgccagcttgatacagacctggacactcctcggaagagagagcatacattgaggaattgcctccatcagattggcctgtgggcgagtctaaggagtattgtcttgatgtgaggtgtgagatgtgatgggagaagacccgtccattgggagtgctgccaccccgtgtaggtggacctaggcatgtgaaagacatggggggcaagctagtaagcagcattcctccatggtcattctgttcctgttttgagttcctgtcctggctttcctggatgatggacagtaagctgtaagatgaaataaaccctggttgcttttggtcagtgctttatcccagcaacagaaagcaaagtagaacactggagttttgtgcttgcaaatcccctggacaaaaagatggggaaggtcttgtttggcactgtgcagcagacagaagttgtctcctgggacagcacattcgggcagctattggtctgttatgtgttgttcggtgtgacctgagtgtggcctcttccccctatccagggcctggtacacttcagtgccctgatgacttcagcctaaccatggcaacctgggactgggcactggccgcctgctttctctccctgtggccctggcttggctgaaggaccactttgaggaatgaaagaggttctgtgtgcatcagtggggtctgggctttgtggtggtaatgtgcttgtgtattccaggtcacagggacgtgctggctcagccttctggcctgtagcctctccctcgcagtgttttgagtccagaggttttggtacttaactcggggatggacagagtgggatgtgccatgggaggggtgtcctgtttccccgcagagctgaggcataaaagtcaggtgggtagcgacagattagagggctccttccatgtcccttttaatagtgttttggaggctggcactgtacctgtgcactccagcatgggacactgtttaatgatgtcaacaatctgcatcttccattgaggcagtccacctccttccctgttctacatgacttcttaaaacaataacaacaacaacaaaaataaccgatgtaaatttacagaccataaagctaactaaccattgcaatggttctgggtcctccatgcccagccctgtgctgggagcatccaaccaggagtccagtttagtggctcctcatctccccagcaagagcatgggagtaccccgaagctggggagaggacttgaggagtgggggagcggccaagggaggcctgctggcacagtgcagggaaccctagctgcctctctgccagtttctggaacatgccggactcttgctgtgacgagcatttctgtttgctgtttgctctctggaaggctgtcttctgccctggccctggatgactgtttggcttccttcccatcttaaagtgctgtcgcaggtcagaactccactttcccctcatccttgcttcagtttccttctgagagtcatcgtgagctgatatgactttgtttccctctttcacgtccactctccaccctgaagagcatcatgcatgcggagactcatttcccaagttttcagccatccaggtggtgttcacgtgcaccactcatcactgctgcgtggaggtggggtgacttagttttccccatgctgccttgctcactctgagcacaaggcttcatttttttctgggttctgcatcctctgtaagatctggagggtgtccttatttttccccggtctgctgttgctaaggcatgaaaggctagcccagtataaggtttgtgatacccctgctggaggtgcttagactgagtgagcgtcctcaggcttggaaactcaggtacctgtgtcagatgaccaggagacctccggagctgagctgctgttgcagcagtgtggctcctgagctctgagacatgactccagcaggcaaggggtcagacttactaatgtgaataagcccaggggtgagtggagccatgggcatgtggggagagggtcctgctggggaggtgttgagtactgttaatattactagttgctgtttcaattttatgatgtaatcactagaatatttaaagtgacagactgatggggtaggctcggggctaactagccccgcctccccgacccctgcccaaggcctgggcttgctctagcactgcacaactgaagtgacagtatccatgttgggccctgctgctgtaggctgaagctccctgaggctaagtgttggtagtacaaggtatttacacccaccagtttccccaccccaactctgtcttctgttgcctgtgtgaccttgggccagggaggattgtggctctttggtttcctgttctgtgaaccagaagctcagcctgatgacaaacagtgacagggaaccattgtcctcagcagggtttcttgtatcttgggcccccaggtcttagagaacctggagctgcctttgttggggaggggagagacccacagggcacacagtttgaataaaaatacaaacctagtattgacaccagcccaaatggctttttgaaggctggaggcagggaatactgatggtcccatccacaaggttttctgctcatagctttgtgctgtggggtgggagtgggagggctcacagttgcttatcactaacttgtagcctaggtagtcactctgatatgtctggagagtgctggacactcctagtgtcacttctactaagggtattagtttctcaagtcggctacaatattttaccctagaaacttaagatgttttccagtacttccctacatggctgtggcccctgctatctccagcaggggtgcctaatctaccactttctgccaggccagttaggacactgtgtgttgaatgatcccttgctggcttcttccgtggagctctggtgcctgaaagtgtctggcaggtatcaaggtggaagtgggttgggctcacacataaattgaaatgactttggctatgtgatcgagggtcgtgtgtgtgtgtgtgtgtgtgtgtgtgtgtgtgtgtgtgtgtgtgtgtgagtgtgtgtgtgtgtgagtcctgtgagtttcaggtgcttcctgagacttctaagttttatttacttcctagggaattaaaaatatctttattttgtatgtatgagtgtttttcctgcaggtgtacatgtgttatgcatgtctggtgctcagggaggtcagaagagggcatcagatcccttggaactggagttatgattgactataagccacaagatgtgtagatttggagaaatgaacttagattccctgcaagggcaacaagtactctcagttactgagccttctctacagcctccaacttcttgagtcctttaagtcctctctttccatgagtgatcagacaccatgaccaaggcaactcttagaaggacaacatttaattggggctggcttacaggttcagaagttcagtccgttatcaccaaggcaggaacatggcagcatccagtcaggcatgatacaggaggagctgagagttctacatcttcatctgaaggctgctagcagaatactcacctccaggaagctagggcaagggtcttaaatccatgtacacagtgacacacctactccaataaggccacacctccaaatagtgccactccctgggccaatcatattcaaactatgacaataagggaatatttcctagttgttacagacacattatatgaatggaggcaatgggctgtccctggagcatcctctggacagggaacggacttgctttgttggctgcactgtctagccactgttcctgaccaagcaggctttctctgtttgcccattcctgcccagccaatgccatgccttcatttggagctcatcttcattaccaggctttccttctgagattcttctcccacagcatcatgtgccccctccccagacctccctcagcctgtttctgtagttttgctcaagactaacactagatgctccaagacacaaactagccctgttgctgtagggtatcgggaaatgggagtcctccagcagaggacagggaagcaggcagaatcaaccatttcatagtataagttgtcattttgagagttcacaagccccaggccactgggttgcagctatctttcagtttttgctggtgaatggtgaggagggctttgcaggtaagctaggaggttgaatagtggtgtcactcaggcactgaggcaggccgagagctttcggtgctgtctgacctgttcagttcataaggcccttctgtgccctagagcttccttggcacccataccgatagcctcaagagcaaggtatgtttgaaaattttagccgccaccaccacaccttggtgtgaagccttgatctatcatgaacctaacctgaggacctcgtcctgccttctgatgaggagatccacttgaagacctcagatgtgccagccgtggaggctggcagcaggcattctggactgcagctggtgtcctgtggccgttcgatgaggagtccatttgctccttcccatttaccggcaccagagagggaagaaaatgatggatctgaaaaacaagccgttgaagaagcttaaaattgtctatcgacattaaacataaataactcttggctcctgagttatctgctgagtgcagtccctgcttcatttaaagcaataaagggaacagaggaatggaaagatgaaagcagtgggtgagggagagtccggtcagtgtcctcaggatgagggacacgggtctgcccatgcttacacccaagcatgtatagacagcactgagtgaactcagtgggtttaataaagacagagcttgtcagtttgagagggaaacatggttggtggggtaggggaggagctgtagaggagtgggtgaggatgagcttgataaaaattatatgcatatataaaattattgaacaataataaagggaaaaaaagacaaaatggcagaggccagtccaatcattccaatgacactattaaccaggaatgtgtgagacaatccaatcaaaagatggatgttttcagaaaggatagaacctgtgctccaactctatgctatcttaatccacctggtctactgtaacaaaatatcttaggcttggagcttgtaaataaagtaaatttctctcacacatactggagggtggtagtctcagagtgcgtacatattcagtgtctgctgagggcctgcttctctgtagctagcaggtttcctggtgagcccccctatgtcagggagggctgccatgccttgggtctaaccccacttgtgggggcagaacttcaccagtcacctccctgccccaccgcaggctgtcacatttgttaggtcttagaggcgcatgtctgactcagatctgggaacataagaccttggaccacagcactgccccgtgagacacattttagatccagaggaataaacagacgttgaaggatgggaatagaaacccagagaaaactagagttgctctgtggatatcaaacaaaatagactttaaaataaaataatcactagagacgaggaacaacattttgtaagtataaaaaaggattgttttcacaggacaagttaacaatttgtcagcatgctctcacttaacaacgtagcatcaaaattcatgagcataacccccaaaatgaagggaagtattcaataatgatagtcactcacacacttcattttcctgcaccctttgtggtgctagggatgccacccaggctctcaaacacacgattcagtgctctatactgaggcacaccctccactcaatatcccattcttttttaaattttctaatttttgagcattttttttattctttgtgaatttcacatatgaatatcatgtattgtagtcatatgcatttccctgttccccttttatccttctggacctccctcctccccccaactacccaacagcccctccccactttaggctctcttcttttttcttgtcactaacggagtccagttagtgctgcctgtgtgcatgtacaccggtgtggggccatccgctggagcttggcaacctaccaggagccacaaccctaaaggaaaaaaaaaaaaaaaaaaaaaaaaaagactcttcccttcctcagcagctattggctagcgatannnnnnnnnnnnnnnnnnnnnnnnnnnnnnnnnnnnnnnnnnnnnnnnnnnnnnnnnnnnnnnnnnnnntgctgaatgttgactggctggatcttgtgcaggcaatctcagctgctgtgagttcgtgagcgcattggttcccatcatgcctagaagacactggcataggtctcctattctccagaaccttttttgccatgttacctgaagtagaggcaggcgtactgtagatgcccctttagggctaagcactctaattggccgtgagcccttcactaagtgcagttgtgaaaacaaggctctctgatgagggcagagagcagtattcctgttaatagacagaacgaatggacagaaactgacaaagacgggggcactcgagcaacactgtaaaaccacccgcggtaacgggcactagcagaggtcagtagagggcgcagatttcttcctgggcgacatccaaggccccgcttttccttttaccttctcacaatccttctacccccttattccctggctgggttgttctggtcttctatgacaagtttcccagcttgtcccctgtccctttgtgactgtcaccgtttaccttcctgccctgcctgctgatcgtgtctacgaccaacctgaaccgaccattcttttttgcccccaacaccgataaccccactcctaccactgtccagccttctttaggactcaggattctcccaagctcgcttcaccttcccttccgtggcctcttctcgggctccacccaccctagtggatgcttggctctgtatgcctgcctcttcatcgctgatgtgactgctctgagggcgggtcctgaacctgctactgctgctgagccttcttattgcacaaaaggattggaaagtagcgtagtcctgcactgaggtaatgcagtgtttatttgtagtctagacataccgtcagtgaagtattaataggaacattgatcctagcctgggtaagggtatgcatgatcggctggaaggaacctctctaaagagcatgtgtagtgggaagataaagattagttagcagtggcagcagtagctccaggaagcatttcatgacttcatatcctctggtgctctgcctttgagcagcctgcctctttagtccttttgctgcttttgatcggccctccaatgagaactagagagcagggtttttgtttgtttgtttgcttttgttttttgctaaagtgtttgacaggttcctctcctgttaggaatttctgtcctctcctgctgattctgagggtggcctgaggaccttgactgtgtgcagggtgcagaggccttcctgtgcacataggcactattttcaaactggtgctttggggacagtatacttggcttctggtaccttcttgcagaaggaagaagaagtcctggctcgttcgctgtgctctccctgcatgggatgatgggtgtggccacacatctgggagaagaggggaggctgagtgaggggtgaaaaactgtgggccagggtcttgggaggaggtcccagaggacctgggtttggcttctctgcagcctcttggtgatgtttgagggtccttttgccaagggcagggcatctggctggtttccacccattaagtagggacggtggtccctgagcagtgtgtgacacctgtacccatctctggcctgcttcctcatcctcagattaaagtgtttaaaaatgatttttaaatcaattattatttaaaatatgtgtgtttatgtatggtgggtgtacgcatgcgtgccatgcccacgtctgtgccagagtggagccagcggaggacattggctgccttgctctatggctttctaccttattcctttgagacaaggtctgtcactgaacccagagctactccagaaagtttcagtaatcctcctgtttcagtctccatcatagtactggggttacaggtgcaggagaccacacctatatctttatgagggctttggagatttgaactcaggtccttctgcttgtgcggcaagggctgttgttacccactgagccatctctccatcctccacaccattaaaaaaacccacagctaaaccatcttgttctaataaacaaaacgggagtggtgtcaagttcagctctttgtctctgccaacactggttttctcttgaagactattttaccttgatgaatttaacatttggaaaagaagtctgggaggccatgcacggagtctgtggcacggagtgctgattgacagcaggcttggctgttgccatggaaatatcctgtgtagcgacaatatacccaatgttcctgcaaatggcaacatccatgagctctgcaggctcagatctcttcccaagagaggatgggatggctgtacccaagacaggatgttgataagcactcactgggcagcctagaaagaaacaaaaccagactgggcctgtcaggatcactctcccagcctccaacatcttcaagacatacttgagacttcacacatctgggtttgaaaaatgggctctgtacctgagtgctgaatatcttgctccgttttagacattggcccctctcctctgcctggcacttgtatcgctgggatgtcatgaatgagtcaggtggttgttagctcttctgtcccaaaccttcaagcatcaaggttgagagcttccaggaccactgttgactgatggatgaggctgggagctatgctcctctaagtatctgaaacacagcagggtcctgtgtctcctggaatgtttgagatctttctccacttctccattggagtaactctcaatttgtaggaaacatttgggaaattgaataaatgaaccaagacaggataacatagtcatgaaactcatgcctgatgaaagggctcccacaatagattcaaaacacagactcctgtcactacctgtgtggcctcttgaagggacacatacccagtacttgagttggtagacaactgggtcactctaacaaactccagaggctggaacttgccacagagattgcttctcaatgtgtcacaggctgcgtagtctgaggtgaaggttctgggctattctggtctggtgaggtcctttttgtttgcagtttgcaatgttctcctgtgccctgctatgctggtaacaggcagaagcaagctctcttttttgtcctgtcctgccttttgtcatatgaagtccccgcctcatcataccatatgaccctgttaggggcatagcatatgaaccttgggtgtcccagctgccatctctaactcactaggcccagcctttgtcctgtctactgctgtgcctttcccctgccacacctttcctggtacctccgaccatgcccaggcccctctcctcagatagttctctcatctgctgttcctctctgtgtcccagattggtcccccccatgtagctcttctcttccacatctcttcccagagcagttcaatatacatggaggagctgttctgggattcatgtgtgagattctagtggtcagcatgaatcccagggtggagcaggcaggggtgctgctgagtcagtgtatatgtgaatgagacttggggtccctcctgctctgtctgcctgggtgcctctcatctcccttaggctcctgtgcctctctgtaaattctcatttacagagacaggcccacatcaagtgtccctccatcagaggggtccccatgactcctgtggctaagccttacctggccttgttatggtatcttcccaacttaactgggaactccttgactgtatttgtgttgtggtagggatggtgtcaggatgtccactctagggttggtactgtgcgggtgtgtgtgtgtctgtagatgacctcaggacatctccttcactccctgatgagctactacaaagctggtgagtaacccctccccaaccatggctgagcaccccactctctgaactccaagtccctccctccccatctcatctcccctcaaccacacttcctggagcttctagagagaaatcatgacacctgtgaactctgggtcccctccctctgggtccctggcatggcttttagacaatctgtgcacacagccagtgcactctgcagagagcgccctatgtatgtcaagccacactgagctcagaaaggatgtggaaaccacagaaagaagttattcttttcttggccctcaccaaccgttcctacccattctcaggggtggccctcacccaccagctctctggggtgtgtgtactcttggcctcttggctcacttcagcagagttgatgcagaaacaacaggaggcctaagcctctggggagactttttaagggtcctgtctcatcaataagggattcttgggtgctgcaggcagtctgcccagaggcaggctttgcattctggtggggagattagcaaattcttacagtccatccgaggccgaattctgccctacaaaataagggaaataatggatctttctccaagaagttcagagcactaaaataatgtgtcagttaccccgccccccaaggtgttataccatctcagaaggggcagccacccaccctcacactcgcaggatggctggggctctttgggctctctttctcatgaatggagctagcttgaccttttctctgattgacctgacagcaactttgtggttctagcctccgggcctagcataataaatggtccctataagtcacactcctgaacaggttaggacaaaagacaatagagccattccctgtggctgtaaccacttgctgaacacattgtctaaggaattcacccttcctgctggattactagcaggtggttatttctttatatatatttcatgaatgtgtgttggcaattgtgttcacatgtgtgtgcatgtgtatatatgtctgtgtaccgtggagccccgcccccaaacctcccaggatgacatcatttgccttccttgatcactctccacctattgacaaaaagtctcttactgaacctggagcttgccatgtcaaccagtctgagtagccagtttgctctggagcaccacctgtctctggctctcctgtgctgggattgcaggaggaccctcatacctactccttttttttttttttttttttttttttttggggtttctctgtatagccctggctgtcctggaactcactgtatagaccaggctggcctggaactcagaaatcagcctgcctctgcctcccgagtgctgggattaaaggcgtgcgctaccacgaccggctgaatacctactccttttatgtgggtccttgagaactgaactctaggccttatcaataagccatcaggaaggactgtcttggtgtggacagagctattcacaggcttcagagcagcgattgtctaaaagcattgccacagtttctggcactccgcaggagctgtagaagcggtggctgttatcagttggcacatatttcttcgtttgtgctggattccgtctagagagaggagggtacagattctggcacttagttattcttgcagaatatgtatcacccatttctacctccgtctctcctttccagcccctggtaagatcacacacacacacacacacacacacacacacacacacacacacacacacacacacgagaagctcaaggacaaagaggagttcccatacagagtgtcgggagggaagcaccctacactctcctgagtgcctgtaaacaactccagtgacaattggatcagccttcagagtgtgtgtttctgagtgtcttaacacactcagaggagcaggtgtgtttttttttttttaagtcagaaattgtgtttgtggtggaaaatcgaaaagtctgattatactgggagctcagtgtcaaatattctgggatttctgttttatgggaatgccttggtggtgtttggttttgtcagcgtgctttgttcttggaggctgtagctgggtgtgcaggaaggagcctggttgctcatctctgagtgtgttcttggcgtcttccatgagcatgcctgagctgtgctgctctgaagagcagggaacaaaccaggcaggtctttctgcagctggggagtgcctggggtttccttcctgccatctgcagcaagtgcctcacgtttctttatcgtttctttagcggtccaatgatactgttgcttgttcaaccagggggcctggtggatgggctgtgatgaggggtgctggctcacttacactgcctgccaccagctagttttaacactgctcctgagtctggaagcagctgtgatatcttgagcttgacttggaaccatcttgagctccatcctcgcaagccttctgccacaatggacaggtctccttttgcaggtgatgtggttgggaagtgagagtccagttttcttggtgtgtgtgtgtgtgtgtgtgtgtgtgtgtgtgtgcgcgcgcgcgcgcgctcgcgtgtgtgtttctgctgctctgtacagtagaaggtagaagaagcaggccacagaggatgggcctggtctcctgctggggttcagtcttcctgtttccttgcccccacctgctgcagtgctgtggtatttacagagtgctccctgcggcaggtgctgtagcttcctcctcagcctttcaacctccacggccagaggaggcaaatcctgggatgtaacagccactgaaaggtgagagctatgagtgggggggggggggcacccctggagtgaaagagccttgcttctctctctacacttgcaaagctttcaggcctacccgaggaaagaggctgggagaccagggtgtgcccagggaagagcagataagattccatttcatgacaaaaggtttgcgaagcagtttggaataccccgcggctgcggctggttctatggtttcctgagaactttctgggccgaggagaacttgcccttcttaaacctcgcacctccgaggcttcctggctgttggtgttttgtgtgctttgggggctgagtctctgtcctggagagagaattggtaaccagtgcaaggtttcagtggccccagcccagtcctagaggtggtggagacagctgtgagctgccatttgttaattgtgataggaaacgctgcttttatgaaggtaaggtgtcttctaactaaaaagagacagagacactacaaaactattaaggatgggctttttaacgtttatttatttattcagtgtgggcatgtgtcaaatgattagcacccaggaatttttttttttcttttctggaagggtgtgggggagagaacagagatcagggaaaggggcgtggcccagggaggcgggcttgagagtgagacttcctcctgacttcaaaagccagaccggaagtcagactgtatgtaccggaagtagaattaatatgttagggctgttagaattcattgacttctttttctatttaaaattgcccccaaggttgagtgactctgcagggtgtaggaggcagatggacagcgaggtgcagcgagcagggcctcaaggcaggtggagctgggcactctggtggccaagaggacctggccctgatgtaggtaatggctctggaggccacaggggtcgctggtatggggatgagtgttctttgcgtcattctgtcctgcgaatgtgactttacttaggacgaatacctttacccatacaacagtgccaggactctgaggcaacaccctcgataaagaccttaggacagtaagggttggagctgggacttgaccctaagtctggaacgagttcttgactcttttttcttcattctgcatccatggaagcccgagggtttcagggcctccgggtccatgttggtttcctggggcagccatgactagccaagtatgagtgagatgttggtaaaaacagtacgggggtgagggtgagatggtggaagggcatgcgttcagatcctgcttccgagtatatttaggagttagatacattcccattgacttgatgtccatctgtgtggtgagtgttgtgttttataaaaagagagaggccagggatatatttggtggaggtgtgttgcagaatggtgtggggaaagggggtgctcctgccggcccatgctgaggcatccctttaccctgaggtaccagctataccgatggtatagttatagaatagagtttatttagggcatgggagaggggttgaggagtaaagacagagaaaggcagagagagggggaggggagggaaggagagaagagaggagaggagaggaagggaagggagtggagaggaggggaggagaggagaggaggccagctatgagcatgtggagagagaggggggaggggagtggggagagagggtaaggggcaagagtgagaggagaagagggcaagggagcaaggacaagcagccccttttatagtgagtcaggcacacctggctgttgctaggtaactgtggggcggagcctagacaaggagtgtgaggagtggaccagatggcctttcttaaagtcccaaccctgggacctgttaatttattacagtgtatcctaaatacttttctgcttggtagccttgattgatatctgtccaccatttctttcccacccaaagttcctgtgttgtttcacagtgctgacagggcgagtgcttctcaggcagccaatcttcatgacaacaggcctgtgttgcactgcttattttacaatagggaccattgctttctggccccactagccatctttactgtgtccaagctcacccactgggaactccaggtaaggggccccgctgtctgggaggcatgtgcttacctgctgggttcctgggtccttcaggggtcaccttcctgctgtgagcctcagtttctcctttgtcggagctggtacagtctggctttgctgccccatgctgagtgagtccagacgatgggacacagctctgcttccccactctgaagagaagtggtcacaggaagacagggaggctgaaaactagatgaagatactaacaccattaatagcgctttgggaattctgtttcatttacttgtttcatgagttctccgtttaggctgtaggtcttggctttcttattcatatctgtgccttgtctcagatagcatcttaccgccaccaaagacacatgcttttctctgtccttcatcccagctagtggctcacctccaggccgatcctggaggcacagctctgaggtgtgagggagttttctttctagcatataccttggggtggctccattttgagcttgctcaaaccttgtagtgatctgttgtcgcttggtctttgttgacactctagggcacaatgcaccttgtatatctccatgactttgagtgtcggtctaaagtggtagcgggaagaggtgtgctgctaagaacctgggtgtaacttggactctgcagagggttgtgagctgagatgtgggtgctctgacctaggcacagctggggaaactattcaaagctggagagaagaagtacacacagcttatttagaaaacacactcatcggttcttacagtgtgccctaggcagtgagttgtgccccgggtgttgctgggagaggatcttggctgcagaatagctgcattaggactggctgctactggaaagatgccccccatagaagtggccttagctgtgaagagtcttttttgatacttcttatttttgggtgtggtcttactttattttattgttttggtgacgtatgtgtgtgggaggttcctcctttcaaggattcctgtctccattttgttaaggctctgtaaaaccaaatctgtggtcagtctgcaaactttgtgacacactatcatgtgtctctcacctgcttgggggacacatctgcttcccagagggcagtggccttgagagacccagaggtgagcactgtgtgactttggtagccttctaacctcaaggccttccttaaagcacctgttcctttaagtgggggaaagtctgtgctgagggcagccttctgcaggtgtggcagagagccgcaccctggtagctggctgcatgtgtgctcagggaggtgtgctggggcagtgttcatctgccagggcacagaggagaccgctcatctgtccaaggctgaccttgctgggtgagtcctcggctgggatcaaacactcccctcccccactcctctcccccttccatcctctccactcgggtgcatgactcatctggatgaaaggggagcctggggctcctgatcatctaggcttctaggcatggttgcacgcagtgtcagctacttctcaatatgctgggactgcagatctcacgggcacatctcaagggaggatggtttcattttgaccccggtttaaaaggctgcagttcgttgtggtgggggaaggcatggaggtgctgctctgtgataagagtgtgaagtaattgcttacaccctagggccctcagaaagctgagagctcttggagggagagcagagttgtaactctctgacccatgctctaatgacccacttcctctaggatgtctaggtcctacctcccaagatttcacaacctcccaaaaccacctggcaaacgtgttcgtgtgcgtgtgcgtgtgtttgtacctgtgtttgtgcttgctcatgtatgtatcttaccttcaagccctagtgcactgtggaggttcagcatgatagaattaatcatactattgcaaagaagaaaaacaacccacaccaacgtgggcttcctctgcggtttctgtttgatactcactggggctcacacttagagaggtggcgcttttttgttgttgttcaatacatacttgaaaaatttgtgtattcaatgtacatggtgctgtgtcccataaagactctgtcatatgagtggacaatgtatattcagcacgccctccattctcctttccttttcttccccatcttgctagtcttctttgtctctaagcactttcagttctactccgatatcctgtatacatctgcgactttaggttccgagcaaagtctatgaactacaaatgagaaagataacaaataagaaagataacttctcgttctgagactggtttgattcgattaatgtgatcatgtccacgggcacccatttcctgcaaatgacataactttgctctctgtggctggaagaaatttcacgtttgtgtagataaacacgttttaaaaccagttcctgtcttggtggacactggggctgttgtgaagtgctacagtagacatgggtgtgtaaggatctctgtggcctgctgaggggtttctttgaatacataccagaatggtgtatggattaaatggtaaacatagtttgagttttttgaggaactgatttccaccctggcttagactagtttacattcccaccagctgtgtgtaagggtttcattttgtccatacccttgacaatatttgttgtttttcttttctctctctgtgtgttttatttgtgtgtgtgtgacatttggtgtcctgctccaccactcactgaacctagagctaggctggcagccagctaaccttagctatcctcctgcctctacttcccacagcactgagggtaagggggcatatgtggccatgcccagctatttatatgggtgctaggtatccggactcgagtccccaggcttacacagtacccagctcccttctccatctcctgagtgtgtgcatgcgtatgcgtgcatatgtgcacgcgtgcgtgcgtgcgtgcgtgcgtgcgtgcatgtgtgtgtgtgtgtgtgctttcctgatgactgccattctccctggggtaggatggaatttcagtggagtttggatgtgcatgtctttggtggctgatgacggtgaacagtcttttgcttgtttgttttctttctgtttattggccctttgtacaccttctgagaaccatctgttcacttcatcagcttgttatcgattgggtttagtttctgtttagttcagagtttgttgtgtggtctagatctcagtcctttgtcaggtgtttagctagccaagattttctcccatcctgctggctgctccctgcttggctgtttctcctggactgagatgaagcttcggaatctcgcgagatctccttggttagttgttggctgcatttcctgacaactggaatcccattcaggaagcccttacctatgtctaatcttttcttaataataaaaaaaaatcgtatgtatggatgtttgcctacaagtgtctgtgccccacttgcgtgctccaggagactagaagaggacattggatcccctggcactggggttacagatggtcatgagccacaatgggggtgcttggcactgagcccatttcctctggaagagcagtcagtgctcttagccactgagcctatgctgaatcttgaagtatattctctgatttttcctgtccctttcggtgtttcaagtttcatactaaagtctctgatccatttggggctgactttgtacacggtcggagacagggatctaatgtagtttttctgcacgtggatgtccagttctcccaccaccatttgttaaagatgttgcctcttctccagtttgtattgttggcattttctctaaaaatcagctacagccgtagctgtgtgggtttgtatacgggcctgctattcttttataatttcacacatacatctataaaatgtacttggagcttgcttctcctcccttacatcctcatcccctgctcctctcgctgaacatcctcttctcccctccccctcttcatctaataaggcttctgtgtataagtaagggtggggggttctttacttgagtgatagcagcttgccagtggctataccaagggaaaaagggtcccctttctcttagcagccattaactgcctctggctccttgggggaggggtggggctgtgtgagcatctccccattcgtgctggaatgttggtggcccagtcttatgccttaggtagctactaaggccctagagctatgggttcaccagtcatgttgtatccaaaagacagtgtttcatggtactgtctgcagtaccttacatcctttatgtcctgctttatgcaggattctctgagcctttgagggggcaaaacagatgtcagtttagggctgagcacccaacagttattctcagcactttgtgggtcttctatggcattctatgatgttttgtcactgtggcgctgcagggtgacttgaactgaggtgtgctgacccccagtgtcaccatgactgtgcaaggtgacttgaactgaggtgcgcagaccccccagcatccttgaatatgctcaagatggtaccttcctgtaaggtgccagggtgcttgctctgggctcacatgcttgtgccatagtttgattacatatgagctatgtgactttggatgagtacctctgtctctctgagccttcctggactcaggagtcttttgcagaacaagtgccctgcctgatagtattgctgcccagatctttctcactagcgtccaaagagagtttaagaggacatgtaataggggccaagcgagggggtccttctccatgcctggagtttggttctgtcctcagggaagtaggcagacaggcacagtgtgtgactgtatctgtcttccaatgctcagagacagtgtatctgcctaggtcaggggactctgggtcagaactcagtgtggttcccagtggtccaggggattgatggctgcctggatgcatttgcggaaagaagaggcaagggaatagtggagcagatgacaaaaaaccactgcaaccacctgactgggggtcaaggtctagttgagggcactctggacctaggaagagacacagagggatgagtaggaaggtctcttttaagagtgtctagaggtgaactggaagtacatttatttttttacgtgtgtgtgtgtgaatgtgtgtgtatgtgcatgtgtgtttgtgtgtgcatgtgtgtttgtgtgtgtatgcatgtgtgtgtgaatgtgtgtgtatgtgcatgtgtgtgtgcatgtgtgtttgtgtgtgtgtgcatgtgtgtgtgaatatgtgtgtgtgaatgtgtgtgtatgtgcatgtgtgtttgtgtgtgtgtgcatgtgtgtgtgaatatgtgtgtgtgtgaatgtgtgtgtgtatgtgcatgtgtgtgtgtgtgtatgtgcatgtgtgtttgtgcatgtgtgtgcgtgtgtttgtgtgtgtgtgtaggttggagggcagtgagtccatgtgagtaagcacctctgccacagcacatatgtggaagtcagaggacatctgggagttggttctctccttctactgtaggttccacgagttgaacacagtttatcaggcctgtgaggcaagctcttttacctggtgaaccatcttattagtcctgagagaaggtttagtgttgcaggaaatattaaaaaaaaaaaaaaaaaagaaccagcatgttcccacatatgtgctggcaactctcggccccactgtggtcctgttgattctgtctctacctgccatctctccagcagggctggagctcataagttcctcacgctgacacgcaatgaccgtccaccccatggtcagccaccacaacacccatctacccagtagaaacaaaactcttaaagcttatagttaaccagatttatgtatcaataaattctcaatttacaagatgccaattcaatagtttcagaaccaattgataatgataaaagctttatcgcaattattacaaccttgtgataccataactacctatggctggttaaagtcatgctggttcacacccacctccatcctggccttcctcttctcccctctgagatgctctctgcccctgcaactcttagctccatctcccttttccctgtccaatcacaggcctcctgctgccctaatgtgattggatgggaaaaaccctgcaacagtttagcttgttctccaagagggtgtgagcaattgcagatgtggaaactgaggcctgcagcagcagtgtgaccatccatgttaatccagatggtccagagatgtgtagctaagttcctggctcttatgtgctgggcctgctctgagtcatacttccacatcccagggatagaggaccgcctgcctaatggctcttggcttctgatttcttgaccatggcagctgatgttagccaggagcttggtgttatgctgctcctcatttatcaaaggccacatgtcacctgatggtactggctgttctccacatgtcattatattcttctgtgtgtccatttagttattctgggggagtttgtggctagtgggtaggtagcactgactgatggactgtactctctgtacaactgctctgaggcagggtaggacattgttgtgacatttgggtggtgacaagtgtatttattgtcaatggaggggcttctagcattggtaactgtcattgtcatggctgcccttcagtgtctgcaggggaccagtttcaccaggtactgaaacctcacgattctccaaatggggctgtgtttgatggaacccacatacatcccccgtgagccgtttagttgtctcttgttttgggtgacatttgacgatgtggaagcctgtgcaagactcttgctctgaccctgtatttgtttcagcaagcaaaaaggaaaagtttatgtgtgtcagtgtagatgcaattaaaaaatctttctcatccacggttggctgaactcacagatgtggagcccactgacattgggggggggggaatgactgttttatgatttttatatcatctttggtcttaagatcaaagtcacagtgttcaggatgggaagtcacatgtctgtgacttaaaagagattcataaaaatagtcattatgcacagaaatgcgtcttcttagacaggggaagcagctgtggagaagtgggggcagctggggcctccagatgtagggacgggaggtccctttactgctctacattctttgtggcttttgaagtttatcaatgtccttgggggcaaaaatattctagacccatggctgctgtgtcccctggtccatcccgaggtctccccttcatgtctctaagacgttgaatgtttgaagagctctcatccacattccttcctggttggttccttggggcccagcactggcgcaaaggcaggagcgtccgactttctctccctctgtagggatggcaccatttttagaatgtctgtgctggacctttactttcagattttccttttcctcgacattttcgatcagtggttttggtaacacatgcatactgaatatttcacaccggtctgggtaggacttacatacagcagcaatggcagctttagtgacgtcataacaagtggcttcaacccatgggggaaaatgatatcatcctgtgtgctaggtcttatttccaacactcaccacccagcacagtttgcttaggaagccagccctatgagagccaaaggctctacccagaaaagcaattgctgcgtactgtctggagggtcagagttctcttccctgatcccctggactgaaaggatgtgcacatagcatgttggagagagtaaagggctctcgccaccatggggtggagaaggctggtgatgaatttggtgaggtcagttgtggggttgtagctgcctgtgtctggaggccacccctccccagctgtgaaccaccttcctcactgtgtctgcagtgatgctcaggagcaggttgagaagccacagcaggttggatgctggcagcagtgtggttgtgggattagctgtattcctgttcacagcctgggagaactggtacagggtcctcatctaaaaaaaaaaccctgcattctgccctgtagctctcaccagggaccacctcagctaccccaccaaggccggctgtcagtaacattcccaaaagggttgtatcatgagcacaccaaactgataaggatcctgtagaattctgtgcagagttttctgtcacacttgattttagggtgcaagttagcaacctcctccacagcaccacagtagcagcccatccctgaatttcatgatgttgactgtaggggcagctgcaaccttgtcctacccttgcttgctggcgtgttaaacacagatcttgtaatcctctgagacttggcacttcttcgtgtacttggtcatccccttctcacgttgtgttccagagaggtatcctccacttctgactggtcccgaatgatcgatcaccaggtctagagttccacaccaggtggggacttcacataggctatacagacaaacaggttcaacttacactcagctgcacatcataggaggtggattccttcatacactccattgggttgtaagtctttgcaaccatggcaatcatgttctccatgaagctcaaaacccactccttggagtggtgtgtgtgtgtgggggggcattcttccttttgaaagccatggtctgatcttacacaggtggtgctctgggaattacacagcagcagcctcgaacccctccttgacagctgtgtgaattctaatcccacatcttccagcctatggtttcaggaaagatgccccatcctcatgtcttcagcttggcgctgtgatgtggcttgagctgtggccaagaaactcaaacctctctcagccccacctctcttgagttagccagccatagtctgcttgctattcttacaattattaaaaatgtattttattattatcatgtgtttgaggtttatatacatatatatggcatgtgttatatgatagtgtgtatgtatgtatatacatgtatacacacacacatatatatgtatatatatatatatacacataaaatttgaacaggaatttactaaagaagtatttgttactgtgactattgaaacagaaggaggaatgcattaaatgaatcgtctgccttccctttgtcccaggcccgaccctgtggagagccagtgctgaatgggaccttcccagacttgagggacatgtgtagatatgcaagttcatctcaaagggtgtgggagcggtacatgtaccaggacacatgggtagaggtcagaggacagctgtgtggagtcagtttcctccttccacctttacttgggttccagggatgaaactcatttctccagacttgcatggcaaacagctttacctgctgagccattgcccgggcctggtagtgctgttttgctgtggccacaactgaagtacaggtgatgatgatgatggtgatggtgatgctgatggtgatggtgatggtgatggtgatggtgatggtgaggatggaggtaaaagagggtctagtgaagatggtaccctcccagcctggtgtgacatccacttatggtggcacaggtctcggcgagatgcccagtcacgatatcccctcttgccagtggtgggtaagctcatcgcagtcagagggacccgtaaggcacgcgctttgatcactgtcctgtggggcggtgttagttctgttggcctagtaaacctcccttgagtttatttgttcatctaggaaaaagtaaagggcagtcatgtaccacatagcgtacttagacatgatacacagttaggcgagaacgtcataagcgcttccacagacgaggcagctacggcatcatctggagggaggatctcaggggaccactgtgcgtgtcgcctggcattggccacatttccattactgactacatggctgtgtttgctactgggcagttgtttgttggcaagaagtgccaattggtggtgggcccatgggtctaaagctcgcacaatcctgagtgggcttcctgtggttggagctttgaaggagatatagctgcccacttgcttgagttagaaatggccagtctgggtggtctgtctgtcctttccatcaaggcttggcagctggcttgccctgctgagttgctctgctgtctgcctctccaattgtggttctcagcagcctctgagcactgcctcctactgtacccgaaccccgctgcctctctttgcatgtctgtttcctctgccccctccccaggatgtgtgactctgaacctgtgtctgcacatggttaggggaccatgtacttggcctgctccagactggtaaagttgttcaggacaggagctctaccttgttaaaagtcacttgaaaataaatcttgtgcacttgcatgtacacatatacatatgtatatatgaacacacacacatgcacgtgtacacacacacacacacacacacacacacggttctatgatgctgtaacaaattcccacagactaggtatcttaaaacataactacagttcctcatgtttctagagacccaaagttaaggtcagaatctgggagggctgctcacttagagggtccatgcggaggacccgtctttcttcctccagtgtccagtagcggtagcagccctccccgttcctcagcttgtaggggcctcacttcactctctgcttcctctgtgcccaaccctgggcttctccttggaaggacagcagtcactcaggatatgagccctaaatcagcatggcttaccttagccaatgacacctcagtggcctccactccagagaaggtcacattccaactggaaggacatggattttggggagaatcctgctggatccagttcataagtgcatctataccatgagccctattgagtattcctccgggcttggtgtgcctcaaagacgctgagaaaatgctgagccctgacctcttgctcttcatacttctgctcccctcctccctcagcgttaacccagactctcttgtcttcctttgcctttgctgggagccttgtgccttctgagcatccctctttacccagccctttgtaactgtggaaagaagggtttatcctggctcacagtttgagggtacagttcaccatggcagggaattacagaggcaggagcatgatgcagctggccgtactgctcctgcggtcgggaagcagaaggagtgcttatgttcagcttccctttcccctttaattcaccccaggaaccccaaacccataaaatggtgctgcccacacgggtctttcttccctaactcagtctagaaaccccctcgctgacatgcccagaggtttgtcttcaaggtgatgctaggttttgtcaagttgacagtcaactcccagaagtcagtctgtgcactctgtgtgtgacagcctgtctcaagaggctcgctcggaagccctgctggaaggccatatgcaggtagacaccctatgcgatctctgctctgttctttccttcctagttctttgtacctaagctttgagtactggtagggatgtggggtgtgctgggtatggtctctctgccctgtcttcctgcactcagaagaggggggcagagcagtaaagtagttaggactacgtctgggagccttgtcccctgggagccatgtcccctgtctccaccccgagaaccccggagtatggccagtaacctctctggatccgagggtgtatccttagctttgttctctgaaactaagttatccacaggaagagagtggctactcttgcttctgcagcacagcagtcttcagattcctctgatgatgttttgggaatgatgctctatggagtggtgagtctcactgctgagtagcagagaccatggaggcagctgaggctgagccgtttaaggctcctggggaggatggctgaattggaactccagccccccggtgcctggctcttgtttactttggtggcctgtgcccttgccttcagagaaggtgaggacggtgaaggatcttgggcgtaggcaagattcctcgcctggccctcatcccactccatttccgaaagtactcggctctatagctgtggaactaatgtcagaatacggagttgtggtcattggccaagagtgtgggccaccagacagtcacagcaggtccaacaggtattgcaggtcagagctgatacggaagtcatggcttcccaaagccagacattggaggataggcccagggtggagctcagaaggactttggcctccaaggaaggacagagtgcaggactcctagcacttgccacacttggaagctcctttggaagcatgaggagagacttgtgtttgctgcagatacatgattgggtcttacctcagcagacgctgctcaaatccccaggacgaactgggcagaggctggaagcttcacaggtggtgtcaggtttataattgcaaatgttagaagggagtgtacagcagcctgatagctgtgcaggcattgggatcccagtttcatttgaattctgaactccgttagataaccacatcaaagatgcatcaatgggcaggcgccaggattgttgtgccagcagtaagaggagatgctgctgctggggacgtggtcacagcacatcgggtcacataggcttacacagggaatcatggcatggtggggtcgcatgggacatgcatgtgcttgcttgctgcagatcatttccgaggtcaggtatgttggttagtgttcgtcaactgtacagaaacctagtcacgtttggaaagagggaacctcgttgaggaattgcctctatcagattggcctgtgggagctttttcttcattaataatggatggggaagggcccagctcactgtgggtgatgtcatccatgggtctggggttgtagaagaaagacagctgagcaagctttgaagaacaagcaagtaagcagagttctttcatggcctctgcttcagttcctgcctctaggttcctaccttggcttcccttcacgatggacagtgattgggaagtgtaaaccccatagactctttcttccctaagctacttttggtcatggtgtttgtcatagcaatagcaacaaattagaacagcaggctttgtgcctgcctggcctcatgctgggcacatgggatgccagtggatcgcatcagatagtttgcaggttaatgggtccaccccgacactaaattcttatgcatctctgtaccaagcactggaaaccttgctgtggtcagtgctgctcacagagctgactctccgaggccatgaagtcctcttcctggtaacagtctatgatgttaacatgcagaaaaaccaatgtgcagaaatctagattgtgagatgaaggtgtggctcagaggcagaacactactagcctagcgtgcaaccccttgcacagtggttctcaacctgtgggacccccttggagtccaaagaccccttcacaggggtgtctaagaccttcagaaaacacagatgtttacatgacgattcatatcagtttgcagctgcactggaataggcacaccaggtatcagaaaggcagggtgacagatcagaaccggagagactgggctccagtgtaatggcctcacactctacagatggtccctagtgtgtttagtcagtggctagcaaatctaactggtgttttattccctcctataagcaaagtgtatgcttggatcatagttcttagctctgcgcctttggacaggttcctttacctgccacagattctaaatttctttattatctaaggtgcatgcatgagtgtgtgtgtgtgtgtgtgtgtgtgtgtgtgtgtgtgtgtacatgcacacacaaatgaagggcagagaacagtcatggaagcctttgtcaggaacacggcccacctctttttacagagtctctccttgtcccagagcttaccagttaggccagcgagcaccagggttagaggcatgtactaccatgctcatatggcttatttacatttttactggagatcaatctcaggtcttcatgcttgggaggtgtactggctagtttcatgtcaacttgacacagctggagttatcacagagaaaggagcttcggttgaggaaatgcctccatgagatccaactgtaaggcattttctcaattagtgttcaagggggaaaggccccttgtgggtgggaccatctctgggctggtagtcttggttctataagagagcaggctgagcaagccagtaaggaacatccctccatggcctctgcatcagctcctgctttctgacctgcttgagttcctgtcctgacttccttggtgatgaacagcagtatggaagtgtaagccaaataaaccctttcctccccaacttgctacttggtcatgatatttgtgcaggaatagaaaccctgactaagacaggaggcaagcactttacccactgagccaccccccgcccccagtcctgtcgtccccacttttaaggttaatgtaaggactgaacattgtggaaaaaataatcaagagctgacagctggcacatgtcctctgaaagcagccgtggtggtgccggtggctgtgcctggagggtagggcacttagttgggttgctgtctctccaggaactgctgtgtctccttgtggactggggtcacggtggacggatgctctggacatctgtgtgccttttgatgttagagaagctgacttcattgctcctgatctagtagcccgagagcccctaacaccgccaccagagactttccccaccacatactcacacctgactgctctactccctgccgcctgaggtggattgcgattcctttacacactagacaggaaaggaaggctgtctagaacctggttctgatccagctggtccttgcctctctcctgcctgtgtggcctgtgctggtttgttttgtggagctgtgagacgtgggggttgagtgggcctttggaaggtgaataggagtttctcgcacggaacaggaaggaggagccagcatgtgtaaaggcatggctgcacatgtaccgggcagtgtccagggttcattctggctggggcgaggccttgatggtagggtggagaacaaggaaattggtgccagactggcagcctgcagggttgggtgtgactccagtgtgcagtagaataagtgtcttagggactttgggtgcctgatctttgagtttctgaaaacctacctcattccctctttttaggctgacatgtacccctcccccagctcatttgcagtctgcagacatctgacagactccttgcctaattgctcagggcacagaaggcttcctttcagctatttggcttgtgaaatgaggacttggaaggggatccgtctgttgcctctgttggaagccccccacccctctgaatgaagactgacacccctagcaggtttccacgaagtagttttgatgtgtagttatttgatgtgctgaattattaacaatatgtagcaagcgaatatgcaggcagattagccattgagcctcggtggagttgctggtcatctctgctccccccacttcctgcttcagtctgggtctcttctgcacccaaggctggagcccgaatgccgatccttcagcacatgtctgctgcctctcacccaggcagcagggctgtgggaccagacacagtttgggtgggctaccaagatgggcctggcactctgtggcttcatatcatctgctgtgtacaagcctctgtgcaagcaagtatgaattccagacttggggagctggctctggggccattgcttcttgaatgctgcatagtgagatgtaccgcttctcttggtccgagaagtttcatcttaatatttagtgtatactgggaagactgcaactagcctgggagctcatgaaatgtttcttggaataaggctggatcagtacacacacacacacacacacacacacacacacacagtttcttttgtttttttccaagacagagtttctctgtgtggccctggctttcctggaactcactctgtagaccaggctggcctcgaactcagaaatccacctgcctttgcctcccgagtgctgggattaaaggtatgtgtcaccactgcccggctacacatttagtttttaatagtcactccattttatcttatttattttgcaagtgtgcatgcgtaccacactgcatatgtgggggtcagaggacaacttttgggagtgggttctccatcaactgtgtgggttctaggaatggaggagaggttgtcaggcttggcagcaaacacctctaccaccaaaccaggcttggtggtgtgcatgtgtgtgttttaaaatcaaagaatcttaaaacttttaggccaagaaagataagttgtacaaagggtcatggaagtgttgtagagttgaccagatactctctggctactgtcagcctctgagctgtacaccagcactgggaatggcactttaggaaggttcattttaaagagtcaatgcaggggctggtgagacaactcagtcagtagagtgcttgcatgcaggcctgaggccctaagtttggattccctgaactcacatacagagccaggcatggtgttttatctgttataccaaggctgaggatgtggagacaggaggattcctggaactcctggccagctagtctagccgatcaacatgaactccatcttcagggagaggtcctgtctcaaaaaatatagtggagagtgataaaagacaccaaccagtgaccttgggaccctacattcacctatatgcatatgtacacctgcacaaacatgtacacacacagaagacaccagtgacccctgccttctacatgctgctgtatgcatgtgtgcacccacacaaacatgcgcacacacatacatactaagtggcctggtggtagagcatttgcccagcatgcgcaacacccacccatctgtccctagcatcctatgcacaaaagccagtgccttccgagtgctgtgtaagccttgccattattgggacaaaatacctggaaacttgaagaaagatgcactttagttcaccattctagaagttttaggtttcatttcaaaggtcagcctgaaggagacagagtaccatggaagcaggagcctgtgatgaagaatggggagagggagaggaaggggagggggaggagaagagagagggggagggagagggaggctccagtggtcacggtaatggcagtgtgtgtggtgggggaaggcaccttgggcctgcatgatcttaactgtgcttgcctatactctcttgcgcattcttaaaacagcactgcgggtgaggtgtcactatttaatctcattttgctgaacctgaggaactgagacaggaaattgaagtgcaaagctctcgccctgtacagttcacattgctctctggcttgtcccttttgtgtgtggccttcagagcactttgagtgtgagtgacaggtaggcctgccaacaaatagccccagcctggaaagcttcaaggcttaggctgtgatgaactctgaaaacaaccaggtggaggtgaggggtgggaaaccccagggcaggcatctagggaagctcactggctaggctggatctgctggactatgagtggtgggggttagaggaacaggatgtacctggaggatgcaggcagaggccttgagtcagcatgggcagcagtgtgtgatcttagtcctgtcatagacgtcttatgatcttgaggttaggtgaactcgctgagcctctatttaggaaacaggatactgacgcaatgtgtatagcacaggggaggtgctgtgtggttgctgctgtcactgtttgtgtgtggtctggtgtgaatatgccacagctgggaagaaagtgttgagcttggggctaaatgatggaggctgttgactgccaagccaaaacagctggattgtggctgcagatggcagatggggtgagaatggcagactggaagggatagaggcttctgggtaaagacccactttatatagtcttagcctttccttgctggttgatggagggccattagagtcagttggttggtcggtcggtctgtcgggtcagtcggtctgtctatctatctccttctcctgttcccccctctgtgtgtgtgtgtgtgtgagagagacagagagctgaggcccctaaggaagactgctctggtgtgtagctggggacctcattgtggaggcatcagtacagtgtggatgctgtggaggtggccaggcatgactgtacagcacacactgtcttttctctgtggtgtctaagaagatggatttacagaacagccttctcagaggtgccttttaatgattttgcatcctactgatatcatcagactggtttttctgacaggaaagccagtaggtttctgaaggaagccaaaatcgcctggccgaatgcagcagccatggctttggaggtaggcgtctattctcagaggcagaaacttctctgttcagcagataggccatggagcctctgccagtcaggctgggcactggggatgcagaggtgggcccttttctgatgttgcctgagagaagtttacacaggcacagtgaagggtctaacacataccactctgagggcaagtaccatttcccagttcctggacgcaggcagcctgtatcatttcattttcctttttcctgcctctattgaaagagtttttttacacagtacatcctagttatggtttcccctccctctattcctcctagttcctccccacatctcctcccatgcagatctgcctcctttctgtctctcattagaaacaagcaggattctaagggaacataacataataatataatataatataatataatataatataatataatatgataaaacaaaacctaatacattggaatagaacaaaacaaacaaaaggaatgaggccaagaaaaggcccaagaaacggatacagacacagatacacactcatttgcatactcagcaatcacataaaactcttaactggaagtcataagatatatgcaaaggacttgtagggtaaaaagagacaaaaatatataaataaaaaagaaaattaaaaattagatttaaaataaacaaaaaagccagccctgaaaggatgttatgaaagcctccagagacgttgttcagtttgttttctgttgtccatcaactgctgggcatgcggcctgcccttaagaggagtctgttgcaagtggctatcaattggagatagcttctgggttagcgattagggcacgcatgaacttctgtttcagttctaggaccctcttcggtgtgtgctgtgtgtgctgcctctgggagttcatatcttcctagatcctgttgatttacgggtccttgttttcatggtgtcctccactccttctgactcttacactctttctgcctcctcttctgatgctttccccgatccctgaggggagggatttgatggagacattacacgtaggtctctcactctctgcatattgcctgctctctttacttgctcctatctgccgcaggaggaagcttctctgatgatggctgagcaaggcactgatatacaaggatagctcagtttcattaggagtcattctcttgttatattcttttagtagaagagtagtatttggtttttcccagagctctgggctatcgagtctcgggttcttggtcactcaagcagtttcgggtatgtgttcccgacatggagagggcttttattcaaatcggacattggttggctgctctcacaagctttgagccacaccgcactatgtatcttgcaggcaggacaccattgtagatcaaggggtttgtagctgggttggtgtttatgttcctcctttagaagcacgcagacgatcttcctgtaccaaagatgctggcacttaggagtgagaaggctctatgtaagtgccagcttgagttctccatgttcagtcttgtcttcagcagcagggccttcctctcagtttgtgtagattaaccttggcaatagcctgggttgtatggagagtcccatgggaccaacaagggcattcccatttggccttcagctcaattagatgtagcccagttttcctatggaagctttatttggtgataagagatgtccagttggggctctgtctcctccattatctggtgattacatttagatgaccttcatatatgtatatattttaggaagcttctactgtattaggttttcatatgacccctcaaatggaccttaagtttagctgtttctctctgtattccctccctcattcccctattcactacctcttgccacatgatcttatttttccagtatctccccatccatccatccatccatccatccatccacccatccataactgtctatgctatttctctttcctaggaagatcaatctgttcttactcccaccccagtcccttactctatatctaaccactctgggtctatttattgcagcttggttatcattgacttaatggctaatatccacatataagtacatacataccacatttgtctttctgagtctgggttacctcacacaggatgacgttttcctagttacacctatttacctgcacatttcatgatatcatctttttaacagctgagtaatattccattgtgcaaactgtaccacatttcctttactcattcatctgctgagggacaactaggatgtttccagtttctggctgttatgaagagaacaacagtgagcatggctgagcaagtgtctctgtggtaggatgaagcatccttgggctatgtgcccaagagtggtgtagcttgatcttgcggaggattgacttgtgtctccctaaggaacatagtggctgtacaagtttgcacacggatgagtgttctcctcaccctgcatcctcgtcagcatgagctgtcactcgcttgatcgatcttagccgtcctgatggtgtaagatgaaaccgtagtcgttttgatttgcatttttctgatgactaaagagactgaacatttctttaagtgtttctcagccatttgagttctctctatggagaattccctgtttaggttttttgtttgtttgtttgcttgcttgcttttttccgagacagggtgtctctgtatagccctggctgtcctggaactcactttgtagaccaggctggccttgaactcagaaatctaccttcctttgcctcctgagtgctgggattacaggcgtgcgccaccacgcccggctttgtttagatctttttaacttgggtgatttttttatttttgttacctatttttgttgttgttgtttatatattttggatactaaccctctatcaaatgtgtagttatttaaaaaaaaacttttcctaatttgtaagctgatgctttgtccaaatgacagtgccctttgccacacagaagcttttcattttttgtgacttctcatttattaattattgatattagtgcctgtgataacggcgttctgttgttagaaagtcttctatgccagtgagttcaaggctccctgttgtctctacttccaggttcagtgtgtctgcttttatgttgaggtctttgatccgtttagagttgggttttgtatgggatgataagtatggctctatttgcagtattttatattccgtcatacagtttgactaccaccattgttggggaatagaaacatgaagactactctgcatgaccaaagtctgaattacgagtctatgttaagctggctggtgactgcctagaaagaaacacttctcacagagcagcctcaaatgagtattacagggggtggttaaagacaaagaacacagaaaaactatgtcctgcttggcagttgcaggggaagcaagccaacagtttaagaggagcggagaacatgcagttatctggggcatttggactccacatttttagaacagggtggatgctttctcacaggacctttcctggtatggggagaaggtgggtgggtgggggtcagttacagtttaaatcaaagatggctccagctgagacaagagagaagaacctttgctatgttatacatttgtcaaaggtgctctttttttttctcccagtgtatttctggcttaaaaacaaaacaaaaggaaattaaaaaacaaaaacaaaaaacaaaaaaccaggtgtccaaaggagtgtgaattatgtctgggtcttcagttttatttaattgatcactgtgtctttttctgtgccaataccatgtggggtttttttcttactactagagctctgtagtacaatttgaggttagagatggtgatactttcagcagtttggtgtgtgtgtgtgtgtgtgtgtgtgtgtgtgtgtgcatgagtgtgcgagtttccatatgaagctgaaaattgaccttttgagatcatgaagaattgtattggaattttgatagggattgaattgaatctgtagattgcttttggtaggatggccacttttactattttaatcctactgatccatgaacatgggagatcttcccatcttctgatatcttccctaatttctttaagttttatcacactagtcttttacttgcttggttagagttactgtagggcattgtatattattagagtctattctgaaagatattttcctgatttctttctcagtctgtttgtcatttggatgtaggaaggctactgatttttgtgagttaattttgcagctagctattttgccaaaagtgtttattctctataggggtttcctggtgggattttttttaggtcacttatgtatactatcatatcatctgcaaataaccatactttgtcttcttcctttccagtttgtatccccttgatctccatcagttgcctcattactctaaataagacttcaatactatattgaataggtatggagagagtggacagccttgtcttgttcccgattgctttgagtttctctccatttaacttggagttggctatgggtggctatcagcttgttgtaaatggctttattatgttgaagtatgtcccgtgtatctctaatgttttcggggcttttatcatgaaggggtgttggattttgttgaaggctttttctgcatctaatgggatgatcatgtggttttgtttttcagtttgcttatatagtggattcatttactgatttatgtgtgtagaactatcccctgcatctctggaatgaagcctacttgatcgtggtagatgatctttttgatgtgttcttagattcaatttgctaatattttattgagaatttttgcatctgtatacataagggaagttggtctataactctttttgttgggtctttatgtggttttggtatcaaggccactgtgaccttgtaaaacaaactgggcaacatccttctgtttctaagatgtattggcattaactcttcattgaaggtctggtgggattctgcactaaacccatctggctctgggccttttgttgttgctgttgttagacttttagtggctgctactatttcacttggagttatagacctgattaattgacttatctgatcttggtttaactttagtaatttgtatctattgagaaaatgatccatttcttttagattttgaatgtatatccttatgattctctgtatttcctcattgcctgttgttatgtcttcttcatctctgattttgttaattcagatcttctctctctgtcctgtagtcaatttggataagagtttgtcaatctttctggtgtttactaaagaaacaactctttgtttcattgattctttgtattgtttgcttgttctttcatttcagtcctgagcttggttgtttcttgctctttactcttttgggtgtgatgtcttctttctgttgtagagctttcaagtgtgctgttaagttaccaatataagatctctccatttttttttaatgtaggcacttagtgctgtgagtttgcctcttagaactgccttcattgtgtctcataagtttgggtttgttgtatattcatcatttttagatctggtcttttcataatgtctgagacttcctggctgttttgtgccaacattttttttttaaagagttaacattttctttgactgaggtatccatttcttctatggtgtcttcagagcctgaaactctctttcatcatgtgtattttattggagtggcttgcctctgaagttcctgtttgagttcctaagcttgtcatttacagatttcctccagtttgttgcttctgtttttactttcaggccttgaacacttttattcacttccttctactgcttgtgatcccgtggatttctttaatgggtttattcgcttcctctttaaggacgtctatcatatggcgatttgaaggccttcattttgtgcttaagctgtgtcagggcctaccatggtagggttgctgggctctagtggggacacagtgtcctggctgttactgtttgtgtgtttatgctggtggcatctgggtttacagtgattgtgactgtaggtgctgatgtttggtcttgccttgttgggtggttattttgtgtaaggaatcttgaagtcatctcaagacgccccaagaccaagttctcagcacaaaagagacttatttgtcccagagggacagagagcagggataagagacaaagacaggagataaaggaagggaagaaaggagagaggagaaatgggtaggggagaaggggaagggatatttgtcccaggaggacaaagaagtgcctctgaatagagaggagtcagacgtggcccataggaaaatggcagtttataaatgtgcaatggctggggaaaaaattcctaaacagaacagcattggcttgtgctgtaagatcaagaatcgacaaatgggacctcatgaaattgcaaagcttctgtaaggcaaaagacactgtcaataagacaaaaagaccaccaacagattgggaaaggatttttatcaatcctaaatctgataggggactaatatctaatatatacaaagagctcaagaagctggactccagaaattcaaataaccccattaaagatggggtagagagctaaacaaagaattctcaactgaggaataccaaaaggctgagaagcacctgaaaaaatgttcagcatccttaatcatcagggaaatgcaaatcaaaacaaccttgagattccacctcactccagtcagaatggctaagatcaaaaattcaggtgacagcaggcaagaatgtggagaaagaggaacactcctccattgctggtgggattgcaagcttgtacaaccactctggaagtcagtctggtggttcctcagaaaattggacatagtactactggaagatccagcaatacctctcctaggcatatacccacatgctccactatgttcatagcagccttatttataatagccagaagctggaaagaacccagatgtccctcaacagaggaatggatacagaaaatgtggtacatttacacaatggagtactattcagctactaaaaacagtgaatttatgaaattcttgggcaagtggatggatctggaggatatcatcctgagtgaggtaacccaatcacaaaagaagtcattagatatgcactcattgataagtggatattagcccagaaacttagaatacccaagatacaatttgcaaaacataagaaaatcaagaagaaggaagaccaaagtgtggatactttaccccttcatagaatagggaacaaaatacccatggaaggagttacagagacaaagtttggagctaagatgaaaggatggactatccagagactaccccacccggggatccatcccataatcagccaccaaacgcagtcactgttgcatatgccagaaagattttgctgaaaggaccctgatatagttgtctcttgtgagggtatgctagtgcctggcaaatacagaagtggatgctcacagtcatctataggatggaacacagggcccccactggaggagctagagaaagtaccctaggagctgaagggatctgcaaccctatagctggaacaacaatatgaactaaccagtacccccagagctcgtgtctctagctgcatatgtagcagaagatgacctagtcggccatcattgggaagagaggtccctaggtcttgcaaactttatatgccccagtacaggggaatgccaggaccaagaagtgggagtgggtgggtaggggagcagggctgggggagggtatagggaactttcgggatagcatttgaaatgtaaattaaaaaatatctaataaaaaaataaaaataaaaataaaatgaaggtgcaagggttgtgatgatgtgcctaattttaattggacatgttataggtgattcaaatgggacttttgattgctggacctcaataatttgatatctggaccttggtggtcagcctcaggagaggaattggccaagtgagggactcgaccttgggagttagctttagggatgcgatttaatggtttttaaccaagcagaggggatgggggaaaaggcaaggcttcccagccacgctcgctgtgctcgggctggctgagccccttcgttttgttcattagtttctgttgcccgctctgtcctcaggaggatgtgctggcggccctgtgttggttgctagggaattacactgggattctactaggtgtggccactgcgggttctagggaaaatgtgtttctaggtattgggaactgacacttaggaatagaggcagccttgggggataaaggaagtttgcagagcgagaaagtagcgcgtctcaccaggatcagcttagtcccctgggaagaggggcagagagccagggaggccatcatgggtagtctgctgcagagctgggcatgagactgggggataagatttgcaggaggggagggagagtgaagacctgaagctcacctacctgcttcactggcctactttcttctctggcagacttggctgctggcttcccagagggtacctgctggagttgggggctgggataatgggatgagaggggaggaaggctggggtgagcctagggaactggctttgaaggagaggagggaaggtgaagatttgtgcttagcctccttggcaggagcgcctcttcagtttttacaggcggcttttctttctttatgtaggagggctgcgggggatggtgctgggagtctatctgaaagcattttgaggcatctgagctcatgtgatactggcctgtctcctatgaagcaggggaacctgcagggccttagggcagcagctgtcgggctctctgcctgtctcgctcacccaggacttggcatagggcgggtgcttgcatagatgaggtggtgtatttctctaaagaatgtgggtgaaactggctgtggaggacttgagggcaggtgctagctgacatagggaggaagaatcattgcggggaatatggaaactgacaagagatcaaagtgcggataccagcaaagtccaactcggtgacccatgagttttgctgcggttacttatggcaatgtgggtgagggttatttacaggagcagaaatgactcaaagacagctgcatccccaaagcatgggtgatggcccatggacatctgcaggaatgcgactggttagagagcatctattccagcaagctgccccacctcactgtctctagcagttcttactgcttgcataaccttgaggagggagggctctggcacggctggcacattcaggggcttcctgacacttgtaaattgtttccttcctgggccataaggagcttctgtccaggacggaaggtttgaaattctacacaacactgggcctgggagtggccatggtactgtctgcagatgagctacagggacacacgagacagtttaagggacagcaagaatcaaggccccctcctgcagtgtaggcatctctgcagccccatagctcctccctctgctctctttccctctgcctggctggtactcaggacattctgctgagttgaattggtaaagaatgatggcattggctcctgatccctgttccttggtggacttgctcacagcaatcgtgtgtgtgtgtgtgtgtgtgtgtgtgtgtgtgtgtgtatgtgtgtttgtgtgtctgtctgaagctaagggatgtgtagagatatgatgctgatgtgtgtttcctgcagcccaagcaaaaacctgaaatcctcatttgtttaggagaaacaaatgcaaaatgccactccccatacaggaaggtctgctgggcctgagcctgaatcaggggctggaagtcagctggcctctgggccacgttgccaggtgacacagtcaccttgcgtgcactctgtctcagaaaggtgcacggaagccatcatgtcatcagtactcggtgcgcggagtttgctggcgtccagcagcaggtcacgtggtaaaccgtggaggctgatgggtggttactgagctgttgcagacaccagccagaaaaaaaaaatgacctgctactgggacccacttgtctgcaagaccggcttgcaatattaaaagatgtccctagacctacagctaaaacaattttataacaagaattggtgaaaggcatacatagttgtgtgcatggatcccaccttgactacaggtagaagcttggatggatgctaggctggggggacgggattggtgacagaaggacagtccctaaggaagatttcctttggggttggtgaggtgtgagcagggtgtgtcagtgccaggggctgctaggatcaaggctttagatgtctgctgaatgggagaggggcctttttttcctcagggctaccctgagagacatggtggctctggactgatgaccctcctcatccccctcaacacccttaccctctggtcatggaatccatccgttgcagaattcaattccacagtgccatggcctagcccgcagctgtctcaagtctccctcggccatgctgtcactgcatctgctgagcaccaggcacagcagctcccaggagcacagaactaaggataaggaaggagaggtcagagacagaggcaagcaggggtttctcactctaggactagcatgggcaagcccggttgatcttggttgagtgagtgactgaatggactgggtggaacagtgttattggggactccaggtctgtttgcccagtgtggcttctcagagggaggcacagggcagactgatggagctgtgggggaggagatctgtgactttggtggggtagggtggggagagagggttgcccctctgagagcagtccttctgggctgggatgtgctaggtagcccttgctaggacctgagagctgcagtgtttgcttctctttatctcatggttctgtttcctggcatctggccgaggatctgggtgcccgcattcattgagggtacccggtttgctcttccttctcttgggatgtcaccggagatcactgcagtcctggtgtcacaggtccttcctccaccttagggaggagtttgcagttgactcatctttaagcccagatggaatccaccctcccaccactgaggcctggcttttcttggtatataggggttaggtgtgctaaatatgtcataactcttgcctctgtggtgtgaccatttaatcccacctgggaagaagcagtgggcaagcctgggctctgtaaaccagtttaccttagatttgtagcccttcccacatcctggacaagcaggtctgctgtgcctcgtttgccttggctggccttatgattgacagctattggccggccagcccgcaatgacagagatttcttattatttatgagtgtttaggcattatagcatagacttcttcccaaccagctcatataactcaactaaccccttcattctagtcatgcttgcctcgtgacccgttacctttcattcagtccccatacatctgacttcctccatgtccggctggcaaatccacacacctgattctttcccaccattcctgtctctgcccagaggtcttgcctttcctctcctctgtggccataggctgtcagttccaaaccaatcagaagatgatggagaggaatgtttacagaacatgatgcaggtgctgagcaattagaacaacaataccaaagtcatgtgcaaatgagtactaagaccaggaacacctgagttggagtttgaagttgggtaggtggtaaggagaaggaaggcaggccaggaagaacatttcccaggcgtcaaggccaaactgcgccaacaaaggaaggttaaaagaacatttcagcttcatagatcctttagtgaaggctggctgggcctgtctagtgcccaagtcaggagcccagatgtccctgtggccttgtcaccacctcaacagatggctttcaagggttctataggcaggaagcgtagtcatactttaaactctgccggtgagggccctaggcacaaccattcatgtacatcattggccaggtctgttcacatgacgcacttctgcagaggagtctaggaagtgcaaggaaccatgtaggacatttccaaggtgtactctagggagcacctttgcaggcaagagaacacaagatggctttcaactctggttctggaagggtctgctctgctagaaaatcaacaaaggctctccttcccctgggtgcatcaccacccactttggggcatcaaccttgtgtctggaaagtggacccatgggagaaggagagcttcagggagcgtatggactcagccttccagaagggttgactcaggttctgtaatttgcttccaaacaactgggctcagtattggtcacatccccttagggcccgcccacccagccacccttccttcctccttccctccctcctccttagagtatgatgtggagtgcatcttcttgtgggaatggaacannnnnnnnnnnnnnnnnnnnnnnnnnnnnnnnnnnnnnnnnnnnnnnnnnnnnnnnnnnnnnnnnnnnnnnnnnnnnnnnnnnnnnnnnnnnnnnnnnnnnnnnnnnnnnnnnnnnnnnnnnnnnnnnnnnnnnnnnnntggagtctggtgtcctgttcctggaggccctgccagcagggccttgacttcacggttcccattccgttcctctgtgactgggtatgaattcaaaccagttccccaattaacaatgaaagtattggccagctttgcatacgagagagtcttaaaagtcagtgctttgctgtaggcaacaaatgattgggtctcgtgtcgtctccactctggcagcttctgtctccatgggtgcctctaaggctttttccacttgtgaccccttttgctggagtaattttcatgaccccaagtttaaaagtataagcacacaaatcagatgtttcctgataagtcatacaatatttactttgaaacaatctttttttttttctctttgatttttgagacagggtttctttgtatagccctggctgccctagaacttacttgtagactaagctggcttcaaaatcacagagatctgcctgcctctgcctcctgagtgctggaatcaaaagtgtgtgccaccactgcccggctttaaaacaattctattatgttcatatgattttagcatttcttaaaatgaaaacatttgcatactaatgagcatgatgggctttttatttttatgtaagaaattaaatattggctgaatatttgatattgagagatggagtagaccacctttaatatattttggagctcgctaatattttgattttgtaatcctcaaagcttcaaatggcactttgcataaataaatatatcatactgaataacaaaagcatgcttagggccacttcagaagttgtgaattctgccctaatcatgagtcacaattcatcgaatgtttctctatgaaatatgttaacaacacagacaggaattaagaaaatttttattatgcttatttatctatcgtatatgtgcatatgcttggaagtcaggggacaacttgcaggagtcactgcttgccctccgccacgtgggtcccagagactaagctccgcatccttacccgctcagccatctcgctagtcctagttatgagacttagacaccaatttgatattcacatgccaaacaatgaagataggaacattttaaaagcttttgtttccttactgaaactgttccatttcaagaagaacagaagtggatgctcacaggcatctataagatggaacacagggccctcaatggagaagctagagaaagcactctaggagctaaagggatctgcaaccctataggtagaacaacaatatgagctaaccagtaccaccagagctcgtgtctctagctgcatatgtagcagaagatggcctagtcagctatcattaggaagaggggccccttggtcttgcaaactttttatgctccagtaaaggggaacgccagggaagtgggagtgggtgggtaggggagcagggccgggggagggtatagggaaatgatctggatacatttgaaatgtaaatgaagaaaatatctaattaaaaaaaagagcaggcaataaaacagcggggagaaggagccatggtgttccctgcagcctctgcgggcattgcatggtacacagtgtgagtgctgggtgctcagagctagcattttgggctgtgtgaattcagatactattgttgccatttttctcctggctctctctgcagtttccggggaccccagcatggggcagcggctggctgtgaagccactgtgctctgggtggttgagttagagctggtgtccttagctgctgtctgcccagttgattattatcctggattccttgaatcttcttagcaactgattttatcttctactttctttctgccttttgtagcttaatgcttccgttttaagaggaactcaatttgttcctcgctctcaaaactatttcaggagaagcccagagtttgcaacatgtatttagaagctgtcttaagtccagtttggatgaacagtacactatagcatctgtatgggtcctacttcctctagtaggttgtggagtctggcttgccgcccctccccctcccagctggagctgcaggcatccagcccacagttctttctgctccagcaaactggtaactgtcagatcagttaagaatagaaacctcaagtttttactgtttacttatgccccctctctctttttaatgtaaaccataattctacaatatctggttttcatttgtttgttttcctatttagtctgaggacttgtttgtttatttgtgtttgtttgtttgtttgtttgtttgagatagtctcactatgtagcactggctggtttggaacccttgtagccagcactgaccccaaactcagagtgatccatcagcctctgcctcccaagtgctagggttaaaggcatacacgacactacaggtcctgctagactgggttttcgactcattgtacccttctctgtagcgtttctcttagccttcttaaaaggggaggtctgtgtggcttggccgatcctttggcttttgtttctcttgagtctttagtctctgaaaatgtcacagttgactgaattgcaggttgactttcttatctaaaccattttttgctccgttcctgccccccccacccccccatcatttctgcagagacgtctgctgaattcttatcattgtttttctgtagctgagctatttcttcttggccttgttttaggattttcttttccttcatctttggtcagctgcagcttgctgtgtgatatactcacgtgcaagtacaatgtgtgtacctatggttgggcgtctgcggttagttggggaagaccacacatagctttacagaggcctgtggctttttctctcactcttccattcacacctgtgttggctagttttagttcaacctggcacaagctagagtctttttagaagagggagccagattgagactatgtccccaccagattggcttatgagcaaaccagtaaattagcattcccccacggcctctgtatcagctcctgcctccagactcttgccttgtttgagttcctgccccgatttctgtcagtgatggagtgtgatgtgggactagcagctgaagtaaacccttttctcttcaagttgctttcggtgtgtttgagcacagctgttagtctagctaatacactgcctcctcactattttgcccttggatagtcttgtctctgtctcgttagtcttccattgcctttcagtttgaagacactatgttagtatctgtgagctcatggacagactctcttcagtttggaaatacaccattggtgcatctgtgagctcatgggctctttagctctgtgcagtcctgcagaaacttgtagaaagcttgtttgagttcctctgtagtgtgtgtgtgtgtatgtgtgtgtgtgtgtgtgtgtgcgcgcgcgcacgcaagcgagtgtatgctttaacttggacatctcgttatcccttcctggatttttcttctctacttacagaccatctgttctgccatgctgtctgcttttttctctgaggccctttgcatgctattcagaattactttaatgtctgagtctgggtctagtctttgatattttgttgagagctgggcctgatgcaaatggagctggagctgtactcgggaagtggttctctgctccgggccctctgtgggacagacattgctttgccctaagacctcagtcctctgatgatctaaggaagttccttatttctgttttctttatctatcttgggactccaaatttcttatgtgttggactagaagctacatattctgttaatttctcctaacatcttctcttcctcccttcctccatccttccctctcatgtgtcctccccaccctcactgggcagcacttcagctttgtagccgtgtggcaggtatttccctgactggagtttctcttgtttagtgggcagcaggaggagtttggactgggcccttggtggcaaggtctgttgtcccagggcctcagttgcttgttctggtgttgcttttggacatagcaggatgatcaggtcagctccatttcctgttatgagctgtgtaacctggtgcttggctggtgcatgcctccatttcttcttcatctgtaacatggatgacagaattttaccctgcataggagtaacagttaagtctggggtgaaagcatctgtttcagagagcggcactgacattggtccagagtttctagcttgtggacacacagtgcctcctgcctcctgtcctgtggtgtgcagtgcacacattgcctcctgtcctctgccacgtgcttcaagtgagacccccaggaagcctttagaaacagcacccacaggctgcacagaggtctgtatgctgtggctcacagatacactgatgaggtcctgcaacctcaagaggtcaggactagaggagagcggcacagtgtggtcctctgggggcatcatttaggaggtgagactctgcctgtaacatcttccaagtgattctatggtagctccagtgaactatgatagaccagacttgagagtggcaggccttctgcaggtgaggcatgtgcttagcgctgggatgctcaggctagggggacacttgctatgtgcttactcagtctcttttgtccctggacagactcgccagtgatggtgtgcacagaggacgagcggagccctgtacgactgcttagcacagccgagctggtagctgtactcgctggtgggcgggcgtgaacctcaggacctcagtgtctcactccaagaggaaacatgtctaaaaagggccgcagcaagggggacaagcccgaggcggagacggactctgtgcagatggctaatgaagagctgcgcgccaagctgaccaacatccagattgagttccagcaggagaagagcaaggtgaggcggggcctccggggccacctcaggctgggctgtgagcactgggctgtgaagagtgtaatcccaggcccaagcctcagatgcccctttgagtacaggagacagctgagaagacgacttggtggtagtttttaccatattctgcctgtgaccttggtggggcttcaagattctttatgtttcagcttcccttccttgcaagataggagtcacggtaggggctatgggcaagtcatctctgtgacaagagctttcttgtagggcatgtataagctttggaacctgttggaacagtacttggctggatacccacatccttcaggaaaacagtcaaggcacagctcttatgtcaacacagtacggtcaggggactccggctgtctggttcatagacacggtggcctccctctgattcagccagaccagcttcctgatcatggatgtgtgacttaaagtctcccagctcttgttctgagcttgcaggagatgagctagttcaaggctgtcctaaacgtctgggataacagctacaggggaataccccaccgccatagtctttgctgtagcagctgttgtgatatgggagggtctgagatccctcagagctgggaagtcacagctgcagatggattctgggggagctggtcacatgaccttcacagtcggaagctgagagcagttagtatgagccagtgttcagcttgctttcttcatagctatgcattctccattgctgtgcagccttgcacaccctggacagggtgctccccactacagaaggatcttcacatatcactcaatgtaattaagataatcccctcaagtcatgcccagaggcccatcttccaggcgattctaacgtctacctgttggtagttaatcctaaccatcacagatagtatttggacccaatagaatgtcctcattttacactaatctgctcattacaggtactcttacaatctaatgccgtcctaagactctagtatttaggactttagcttgtttgttttgtgagacataactgagcctccataccaggttagccctggtctagcaggtgctatactgtggaagacagacttgtgggggtctgtagtgagaactctggaatgttggtttctattattttaaaattttaaagatttatttatttatttatatgagtacactgtagatgtagatggttgtgagccttcagccttcatgtggttgttgggaactgaattttaggacctctcctcactctggtcagacctgcttgctccggcccaaagatttatttattattatacataagtacactgtagctgtctttagacacaccagaagagggcatcagatctcgttacaggtggttgtgagccaccacgtggttgctgggaattgaactcaggatctctgaaagagcagtcagtgctcttaaccactctccagctacaattttgatttcttaaaaaaaaaaaaaaaaaaaaaccccaaaacctcagactattttaagactatgtttttgtcttaatcccaggtatggagctatggggctgctttgcagcagttgattatgatttgtcttgtgctctaacagaggcatggttttgcccagctgcaaatagtttctgcaattgtgtgactttgggattctgggaatttttctgagggtatataaatgctagagccccaatagttggatagttgggtgggtagttgttggttgtggtttgttagtagtggtactcaaaggaaaagcaagaagaaaaaaattattcagatctcactctctcctcctatctagtgatagggggtgaaaccagaggagtaaaaggttgctcaaaggagcaaagaccagctacagtcaaagaagaaacaagaagaaagaaattagattcagagccgggcagtagtggcacacacatttaatcctagcacttgggaggcagaggcaggcagatttctgagttcgaggccaacttggtctacagagcgaattctaggacagccggggctacacagagaaaccctgtctcggaaaaaaaaaaaaaaccccaaaaaaaccaaaacaacaaaacaaaataaaacaaaacaaaaacaaacaataaaagaaattagatctctctctctctctctctctctctctctctctctctctctcctacccttctttctctcctatctagtgatgtggggtgaagccagggggataaagggaagggaaaagaactcataaagtaacaaagatcagcttcgggagtctccgactacccaggctgcctctcagctctgggacttgggatatttgccttgccatcttcaggctgctgtcccctcctcatcaccccctgtggtctgcatagggctttgcctgtttagtcactgagacaagtctgctctcagagaactcagtagagcagcccccaggccagcaggaaacgcataaatgtgaattgcacgatttcatttaggtgtcattgaacttgatatcatactcaccagcaaggtcatgttgatggtgtccttatgttagcagaggacaggcataaaagtctttggttgaagaaggaacatgaggcaaatgttcctctcaacatttgtgatggtttgtctattcttggaccagggagtggcaccatttggagttgtggccttgttggaataggtgtgacctggctgtagtaggtgtgtcactgtgggtgtgggcttaatactctcaccctaagtcagtcttccactagcagcctttggatgaagacgtagaactctcagctcctcttgcaccatacctgcctggatgctgccatgctcccaccttgatggtaatgcactgaacctctgaacctgtaagccagccccaattaaatgttgttgtttataagactttccctggtcatggtgtcttttcacagcagtaaaaccctaactaagacaccattcattcactgaggggcttatcctgagtactgtatgcagcctgctgtgagctgggacacctgatttgcatgaggtgactcagaagaggcccctcccctcaactggtgcagggaggggtggggtggagtgggggaggtctcagcacctgcagggcaagctgggcctgtgaagaccttagagctgatcctaaggatttctctgactggagaggaagtaaacagatttgcattgcatcaagttttcaactgcccccatgagcaacatgagtgttagttgggggcatggtgggatgagtgtctggctggcagggtagaaacctgaaaaggtccaaagtctgaagtcatatggggagcagtgatggtggagggaaggccatgcaggttctgtagccagacagtgatttattcagtcttgcagcaactagtccatactatactatttattcatcccgaggcaggaaccagccttggtctgcagaagtgagtcagactttgaccccagccataagggattggttggccttggtgggtggggtgggagtcttannnnnnnnnnnnnnnnnnnntccaggtcttgtgtgtcaggatcctgggctcttgcagttgctgctcttacaactcttagaccttggatgtggggacccttagctcttgggactcagtccctaggaactgcagcctctggcctttggcttaggaagcctgtcgatgccttctgctgctgtgttggtgctgtcttgtcttttacagtgctttctttgtgcttccactatcctgagctgtctcctgtctgggctccaggcagtctttgcccagtcactttctgtgactgtactggcttcatgaggatggtgctgtccctaccaccaaggcagcagcagtcaccacctctgctacctcccttaccagcttagcctgtcttacccacggtgaagctcacagaagacatgacatctcaggagaatctcttacaacaccagggagcagcacaggagggggtgcacccctgggtcaaaaagtgaggggtatagcccggttgtggggcatggcagggagtggcatgcaaatgtggtattaataatttctgccaatcacaacaccacttccagttctactaaggcccagttacaggctttgcactggctcagtaacaaactttcttgtgtgagggaagtacctacttctagtgagacagctgcagggtgatccaggtccttcacaaagcctcagggctgacgctctgttgtgttagttactcctcttgctgttgggacaaaaaagattctgatatcaatagcctaggggtagagagctttatggaggacatgtttattctgacccaccttttcaaaggactcatccatcatggccggggaggtgtggccgagcagaactaaaggttcatgtcagggaagcagaaaaaggaggcttgctggagactagctggagtcctctcttccatcttattccgtctgagcctccagtccatagaagggtgccctccagctgcagggtgggtccttcctccttaggtaatcctctctagagatatccttacaggcaactcccaaaatcctcatctccagggtgagcctaaaacatagtcaagttgatggtgaagtctaccctgtgtcagtatggcatggagacagccgccctttaaaccatagcattccatcctagaccgaccccaccgccccagctcatccacgatgcaaaatgtgttcagcctatatctgtggtctccaaaaccttaagacttccaacactgtttaaaagtccgtgttcaaagtctctctgtgagactcaaggcaatctcttagctatgaacccttgtaaaactacagcagacctatatgttccccaaatataatgggccagagccatgaaaggagccatggcaacagaacaaacagactgaacctctgagagcacttcccttctctgctgcgtgtgagcaggtccccagctcccaggtcctctccaggacaagaaagccttcttcccacatttctccctggaaacgctctcagtcctatctagatgcgttcctcgccatctcggagacaattctaaaccttgacagatttacagtgagaccatagcaccagagttgtctgaggcaggtaggctggagcaggacccgactcagctgcagtgttccttgcatttggacggtgctgtccttaagtctatggactgtttgagtcttgatgccctggcgctaagttcaccaggagagtgccagttccagctccaggtgaggtgatcgatgccgtccacctgttgtttctgtgattgcatgtgatgtcaggagatactagtctcatgcatctgcctcagggcagctattttgcatccaattccatactgggctgccagaccctctggcacaaggtaatagtggtgcctgccatcactgactcaagttccctgcccaggggcactaaaaaaaaaaaaaaaaaaaaagctaaactgtttagaatcttccttggcctctgttctctctttagtttcttgtcctttctcttacagttcagaaccgaaacgtcctcaaggtttgtctctccagagaaaatcataaagtactgtgggaagggagatggggatgaggttgggatggagctgtgggtgtggcctgcaggggaactagagggtggagacaggaagagcagctacacctgagggatccgaccctaactctggccactgttctggctgcaggtggggaagctgcgggagcgtctgcaggaggccaagctggagcgcgagcaggagcagcgtcgccacaccgcctacatctcggaactcaaggccaagctgcacgaggagaagacgaaggaactgcaggcgctgcgcgaggcgctcatccggcagcacgagcaggaggcagcgcggaccgccaagatcaaggaaggtgagctgcagcggctgcaggccacgctgaatgtgctgcgcgatggcgccgcagacaaagtcaagactgcattgctggccgacgcgcgcgaggaggcgcgcaggacctttgatggcgagcgccagcggctgcagcaggagatcctggagctgaaggctgcgcgcaaacaggcggaagaggcactcagtaactgcatgcaggcagacaaggccaaagccgccgacctgcgcgctgcgtaccaggcgcaccaggatgaggtgcaccgcatcaagcgggagtgcgaacgtgacatccgcagactggtacgtgaactctctccccacagcaccccttccttcaagcacaggggggctatgtgctccaggcaggcaagattggagatacaggggcgaccgcaaagtcctggctgttcccgggatggtagtaggtttagaatagcaggtttctcctagggtggggttctgggaagatttgtaaagcgagagaagtagtttccttgtctctatgtaggacttgtggatgggggcggcgggagggggggcagggctgaggtgctgtaagagcggacctaggctgtagaggaaaggcaggagatacagcccctttattcacttgaactggagtgggtcttacatttgggtgagacccagggctgcaccattcgggggaaatgtaaagtgccaagtaagcaaataaataaataaaaagggaaataaaaaaataaattaaaaaatttaattttatttaaaaagtgggagtggagtgagagctgttaagttgatttgacctccattcctgatggaaggagcccttcccagtaccaatgaccaccagccctagcctgggttcttagtgtaagcaagtggaggttttgattaagaggtgagtggaactttgagctatctcagcggtgacaggaagaagcagggctcagactgggtcagctcaccctggtatactcttctcccatccaagtacttaaccaggtccaaccctgcttagcctctgagcccagaccttcagcgtggtatggccatagactggtaatattcttcttagtcactgaagggatgtggaaggtcagtgggggcttgcagggcataatgtcaccttccacagtcctagtagacacaggagacagggctctgtacgcatacgggactgtgttgaacagctgtgtgcccctcaaggccctggtcagcctgcagcagggtggcacagcgtactaccacctcagctagcttagaatctcagcctgcaggaaggggtgatttttaggagagccacttcgaaggctgagggctgagttaggtgcaacgtaaagaaacaagatgatgtaccatgagcacactgaccccgagtgtggccagcctggtgacacagatgtgaaggaactacgtcaagaggtcataactgaccataggcaggagcagcacttaacagtgaagggtttgataggaaagcctaaaaaaatgtataataaatatttcaaagacaaggaggaggaagaggcagaccgctggctggagttggagaagaacctctctgggtacacagacctacccaggcagcccacagtgttgctctttgggaggtgacatctagcactttaatcaaaagtcatctgcgcttcaaactgtgagggttctcagcactaactgcgtcagtccacagagcaaagcatgccgtagatgaaagaaatactgggactcaaccatcttttgagctgccttgtcaggagacaaacaggcaattgacttcccaggaaggggcctggcaaggtggctcagtgggtaaatcacttgctgtgtcagcctgatgaactgagatctcgaggaacccttggcgggaggtgggcggcgagaactgatgacatcataccacggcacatggcttcccatacgcaaatacaattgtcatataaacacacaacgataataatagtaataaatattaaaatttcacctcccagaaagtagagcaaggaaaaccataaagaccaagaactgctgaagataaaaaccaataaagaaatcaagttcagtaattcagtaatgaattaaaattaaagttgatacagtgttcacagtatgtatgaaggggacagaggctttaagtcacgggtggggatgggggggggggaaagtcatgggggaaagggatgctgacactgaagacaccttggggagtgtagatcaatagtcaaggtgtagttagaggaagtggcagctagcccatcaagatcaacactgtaggatagaatgtcccatagctgtgcaggttgttgagcctgtagctcgcggcacttccacacttaagaagagcctaggtctggcgccttcacaggaatgtcttacacttacggaggaactaatgaatccttattgcatcagctgcgaggctgggggctgtgatccaacacctgaccagaagcctcttgagaaaggaaggactcatcctgtctcccaatttgagggtgcagtccatcctggtgagaaaggcctggtgggtggcaggagcaggaagcagctgcgcacactgcattcacagtccgtggaaacaaggagaaatgaaaactagagctcaactgacttgtgtttactcagcccagggtctccaccatggggtcactgctgctcaacacaaaggcgggcagggagtcctactttaattaaacccctggagacatccagaggtgagtttcctgagtgattttaatcccatcaagaacaggattagctcacacagatgcaatgcatccaggaagtagaaaggccctcaaagcccttaggattccatcgccagccagattccaaagcagtgacttgggaagaactagggagggagcactctctcttaagaacttagttataagaatgctaactaaatattaaccaagaaagaccagggctctatgaccagggctctaataaatcatgagccagggtaagttaactatgaaaatgtaaagatctagtatttactgatttaaaactagagaattttattctatctatctatttatctatcaatccnnnnnnnnnnnnnnnnnnnnnnnnnnnnnnnnnnnnnnnnnnnnnnnnnnnntacccacccacccacccaactatccatccatccatccctgtctgtctgtctgtctgtctgtctgtctatctatctatctatctatctatctatcttatctatctatctatctatctatctatctatctatggtgttttgagatggtctcactgtgtagccttgcctggcctggagcgtgataagtagaccaagctggcctcaaactcacagagatccactcatagaggccaccacacgcgcagcctgtgcagacgtcaacctgacagtgtaataaaggattaaaactcacgtggccatttttgtcgacgcattcaaaacattttaaaattcagcttcctggcagactcttagcatgtctggcttaaaatggagttgctctagtctgataaattgttcttttggaagtctgctaacaatgtttgtcataatgatgattcagttaaggtttcccactcaagttcagggtcaagccagagtgacccttctgttcagctcttctgttcagcatttcactagccaggggacagtatacagaagatctggaagcagtaagttctaaagatggggtgaaggggagcctaattatatgcaaatgatgctgagatgctgcagagtccagggtctgtcccagttcctccagtctgtttcttagcacagactgggcaatggtggttctcaaatgagaaagccaaggtatcactgggttctgtgtctgacaagtcacagtctgtgcttccaagatggcatcctcagagccatgtcctcaaacagttggcacaggatggcaaaagggaggcacacagtggcctcggcctctccttcaaggtcatcaatctcatgacttctcagaactaacaaacgcatttgtccaagctctgatacaaagtagacacaaaataactttcgtttctgggtactagaagtgaaccgctggaagggaggagacttttaattttaagaagcaggaaaaaaaggctccaggaacaattgtcaggcaagttgttcaggagttctgccaggctagaagggttaagggagagccaagtacgtaaaccatatgcattgatgagaatgcccaggaagggaaagctagaagccaagctgacttccctctgaggtaggtgtgtgtgtgtgtgtgtgtgtgtgtgtgtgagtgtgtgtgtgtgtgagcatggggggcggtgtggaggggtgtgggcatgactaagcgttgttttaccctgtccttatattcccagtgacagacagatcagtttgatttcccagagttcatcgagggaaccaataagtttgggtcgtggcaagagtgtgggtagccataatacagctgcaccagggggtttgtacccagcatgggtggtggcttctccatgcctgtgcagatggagacattctcaataacacccccatgcctgtgtgttctatctcctccccgaggccctaaaaccaagttctgtaagggcagaattgcctgccactaggaggagtggttggatattcagggagggttcagtgactgtccctgacctcccatgtggagatgtaagtggtcaagcccagctgtgatgaacttttgggagtagacggggcagacagatgaagatggtgtttgtgtttggagggtttcgctgtgcagctcggatattggcaaacagagtctaggttagtcactaaacccttaaaggagttgggatggaggatgtgtgtgtttgttcgagcatgtgtacctgtgtgtgtgtgtgtgtgtgtgtgtgtgtgtgtgtgtgtagcttcctgcttgctagacaagcatcctatccccaagtagaaacaggagggtctaggaagagacctctagatatgggatcacttgacttaggggcaggctgtctcctggtgcagtagggaaaggatgtcgtttcagtaaacaacactgggacagtgcggaattgtttctactaggacgtgtttatagccaagacacctcctacagtcaccggagtggctcggttaaaaagaccagtagtcccaagacatcactggaaaccccgtgtcccacagatgggagcattgtaaagcaaagcaatgagaacaagcctgctggtgtgggagcccagacccagccacattgctttctggaaaggatgagcaacacacttcccaaagaatgggaactcagctggaaggaaagctgttcaggcaggaaaggggaggatgcccaggaagatacgcttaggtttatctgtagcccttagtttaaaccttcagggattgcttaaatgaggcaccgcagtgtgctcaacacagagaagaagatgtctgacccagggatgggtggaacctgggccacgagcagattcacactcccagaaatctttccatcttactggggcatgagacttcgatccaggacaaacaacaaagaaacaaaggctcagctgaaagctgattgaagaaaggagttgaggtaccagaaaatttatgctcgagggcggtaagaagaaagggtcatagaagttcaggtgtgacaagtaggagggagaaggcagaagtaaacagaagacatctgtagttccctgagcacagagaaaccaaccccatttaaaaaaaaaagtgcctacagggaggtcaggccttcagcactaaggcccactttccctgaaggacaaagaagaattgctatgcaagtataaataataataataataataataataataataataataataataatgtgaataatggcatattcagttaaaggaatgcatgtctggtgtgtacaagagtttaggggggctggtgagatggctcagtgggtaagagcacccgactgctcttccgaaggtccagagttcaaatcccagcaaccacatggtggctcataaccatccgtaacaagatctgactccctcttctggtgtgtctgaagacagctacagtgtacttacatataataataaataaatctttaaaaaaaaaaaaaagagtttgggtggactctagccatgtgccaggagaaagaagtcaacccaaacctgagggtaaagcctccctatggtgcgactgtatctctaccatgcaggagaaggggatagaggagggtggcatggaggacagagcagaagctgcctgcagggtgggtctgtgaggaatgaaatgaaatgtgggtgcatcaattcaaagttatccaaggcagtgaccggcctgtacagtgattgttgatgcctgagcaaaacttggccagttctggggtgactgagatcatgtggtagttagctatacagaactgcaccatgcagggactctctcccaaggtctgtcgctctctgtacaactgcaccacccaccccgtgcagactgagcccagtgcccgaagccttgtggactcctgcactcagcaagaggttaagtgatacagagaaggaaatgcacacacagcagggtgtttgacaaatggatgtagcactctgctgtcttctggactggtcctgaaccaatcaagaatctaaagcatccggcaaaggaggaagggacgagtctctgtcatcaccagcagagctcggccagggaggaacaggtttggtaaagggcaggacagcttgtagctgttcctgtctgaactctgcagcagcctattggatggaaaacctgaacctgcagaataggtagttacccaaggcctgtctcccatggcccaggaagaggagaagatatagggaaaatcacccatgcttcaatctccatgccttggctccacattgttgattcacatcaagggtagtcatttcctcaccccaggaagccagacactttgctgggagagcgcttcccactgacccaccaagtgcagacatatagactttggcttgtttgtttgcagggtctgggggccagcagaaagctatgcagatgcagatattgactggttctgcttattagaaaaccagagtggctttttgtatagctggatatagggaccagtaaggcccaggaccagggcttcccttgtccttgtgacccccctctccacctttagttaacatcactgccagactagggggatgggatggctgtgggaaaggaaacccaatgacatttggtctccaggcggaagctggagggatgttgaatgccgctggactgggctaactcagtctagtgagagacacggaagtcaccattctccttgactcattccttgagctgagcacctggaagatctcaggaggcaaagagcagggaccctcaccaactgacaatggtggcacctacctcttgccccagcgagagagtcacctaacgaatgggctcagggcctttgtgctggctccttcatgtcctttgcccatctccagtcctgtcatgactactctttttagctcccatgccaggctccctctgaagaagacctcatgctctgggtcccctctgtaaggcaagctgcctgagaaccccacatagaccagaccccaagcccccttgtcacccagactcttctctgtcttcatggtggcatttatcactattttggggaataggagtccaaaatcaaggcagcgtcagtatcaggctccctctgtaggctctggggaaggccctcatctcttccaggttctggtggcagctacctgttcttgaagctccttggagtgtggctgactccatcgaatctctgccttcacccctacatctccccatatctctgccctgccttgtcttaaagacaccagtccttgtatttggtgcccatcctaacctgtgggtgtcattttcatgtctatcattgtatctgcacagatccgatagccaaggaaagccatgctctgactcagcaggctagcatagcatttgggggacactgttcacctgtgagaggtgccgagggtgacagtgataatggctgtagtagtagtggcttctgtctctgacttttgaatcttccaaactttgtagagcagtggagcccacagagcttcaaaagacagaggtaggttgctgcccaactgtgatttccactgccttgcacatccttggctctgccttccagaaccaggcttgcagtgtgaggaggaggagagggctgggaggagccaccagtgttctgccaatcagggcacacttgcctctctctctgagattgggtttgtgggtcatggatggaccaggtctattccacaggattctgctggtggtcacaggctgatgacctgctagtaagaacccaggttctatctgtggtcaagaggaaactccccaacgattggacccgaaagctttaaagccttcttggtctcctggggctggggctgtgagctcactaagtgctcttagttccagagcgagccttaggatgccaaacctgaggtgttaccaggaccatgtggtttgaaggctctggaggagggtcctttccatcttccctagttcttgggttgcccatagttctttgttccatggctgtgtgacagctgtctttgttaaaaaaaaaaaaacaacaaaacaaatcaatcaaacaaacaaacaaaaacaaccaccaacaacaacacatccagagatcctagagaaggtgtagattctgggtgacactctaaccaggaccgtgtcctcacagaaatacttccctaatggttggtttcccatgagtatgttgaaggatggtctggggttcctctgcaaacctctttcagtgtggttccctgctctatctggcctgccaggctaagctctgtcccctgtttggtgtgctgtcccagggaaggctggatttgactggactggagaaagcaagggttaagtatccctctgtacccaaagagagggctccccacacctggagaaggggtctactagaggccaagcagagtttaggtgtccagtagttctgagactcggattcagagggcacttaggattggggaccaatctacatttctgcatcagttgcaggtaggagacagtgagtagacagcaggaacagttacctctggaagaaatgcatctgggaggaagcagggtgggctggactgtttggggctgatagggagctgtcgggttaggggagccttaggacgctgagttgcggtgagaagtgcccataactgtagatcctcagacctagggctatgtcttcagtgtttgtgagattagaggttctgtgctgcacactcaggctaccccactcccagttcagtggacccagcctcagcattaatccagagtctgacagggacacccctctgatcctgagcccacacctgatggccctttttgttttccctgtaccagatggacgagatcaaagggaaggagcgggtgatcctggccctggagaaggagcttggtgtgcaaaccgggcagacccagcggctgctgttacagaaggaggctctggatgagcagctggtccaggtcaaggaggcagaacgccaccacagcagcccaaagagggagcttcctcctggcattggtgacatggcggagcttatgggtggccaggtgagggatggtgtcccctgctagccagaaagaagacctcttagctacatcttcccgctgctggtctttcctactctctcacactcccctcctctctggatccttcacaccaggatattcatgatatccgatgaggcagagaggaaggaagggggagagggaaggagggaaggagggagttactgatattcagtgtgtgccaggctcagcactcagcactgagaagatatttgtggagaactggctggctgagccggctgtggctggagttgcaaaaaattatatggaggtacagagagcagggtccacagctgatgctttgcaaaaaggaggtccctgggcaagacggagagtggcaaagtcagaggcccggagaccagcagggtttccccaaagtggcagggcgtgtgtgtgtgagtgtgtgtgtgtgtgtgtgtgtgtgtgtgtgtgtgtgtgtgctgggggtggcaactaccaggcccttaggaaaaacaggcagttgaagcaagcctgccctctctccctttcttcctctctgcttcatcgggtgtcatgaatgctctgtgctgagtgtgcatgaggtgctgatgtttcacagttgagcaagacagcctgctgtggaggaatgtactagcatattctagaaaccacaatggcatccagtgggttctcataagtttgcagcatgggtgggaacttcaacttcaatcctcctgggctggtgtttgaatcacaccgaggttttcagtctcaggcaggttgagatgaagtgtccccgggaggatgggacaggtatgcctgtccgtctgcctccatgtcgagcacatggtcctctagacggggccgtccccgttgtgtcttcaccgggtcttcagaggctccgtggaatcatttgagcttcttcaaagtttttttatttttaggatcaacatatggatgagcgagatgtgaggcgatttcaactgaaaattgctgaactgaattcagtgattcggaagctagaggacaggaacaccctgctggctgacgagaggaacgaactggtaaccacccaaaacatgtggagtctggacacgaggaacggactaggtccaggagtggatgcagaggggcccctgggtctctttactttctattccgttctctctgtgtgtgtgtgtgtgtgtgtgtgtgtgtgtgtgtgtggtgtgtgtgtgtgcgtgtgtgtgtgacactcatggaagaaatctctccgcttattgtctgtggagggatccatccttagaaaacagtgggggaagagggtgctggaatctctgcagggtttcccactatttacatcaacagaaagtaacaacaaacacaggcattcagtaccaaagcctcctgcacagggtctgtgggggtttccagaccgatgctgcacagtgacgaggagcagctgtcgccaacagggagactcctcacccttgagtcgcagggtggaagcagcgtacagagcaggctttgtagttgttttggatttggaaagctgttcttttaggtagtgtggttatgaatagctctctttttcctttatttacttggcataaaagttgatttatttctatttttaaaaaggatgagcatgcatgctggtagtttagttgctagagtctttgcctggcatgcaggaagccctggattccatacccagcaccccataaactgcatgtaattccagcctttaatcccagcacctgaggggtgaaggtaggagggtcagaagcttcaggttgtacttcagcttgtctcaggttgtgaggccagcctgagctaacgttgtgaggctagcctgagttacctggcatcctgcttcagatttctctctctctctctctctctctctctctctctctctctctccctctctctctctctctcttctctctctctccctctctctgtatgtgtgcgtaatgaacacagactagtttaaaacaaatcttttgtaaaactagtatttgcaagaatatgcttatttttgttatcaaaatagctaaactaattttatttttataacttctctctctccctccctcttttcttccatctttcttcnnnnnnnnnnnnnnnnnnnncctttctttcttccgtgtgtcatagtacacttgtagaatggcagaaatcaactttgggaagttggctctctacgtccagtgtgtgggtttggtaatgggagttaggtcatcagacttggcagcaagcacctttacctgctgagccagcctgccggccccagctttgctagttttccatcgttaatgcacaaagcttttggaagaagcctcatgaccttgttgctctttctaaccttggctgtgaagggaaatgtatcttcacaggtttagcagaaacaaaatgacgttcttcctagtgtacgggaaggcataccctggacagctatgatcagactgtatccccattatgtttctacttcttgcttaaatattcatgagctaaataaatactcatgagccacgtggcaatttactgtagcaaaacctgtaggctgcctgaacaagtctcaggtagaaagagtgaggtggttggcatctgaattccccacggtgcagtggctcctgacctgggtggttggttacacatttcactttagtaaacaaatccacacccaaagggttgacttcccacttgcaaagtgggattagtgctctgcaaggtgcgtgtagatttaccagtgtagccattcccttatggtatggtagtgtcatagccttgatggccacccttcctgatggccgttcaggctgctcctggcttctttactgtaataaataatgcaagaagccccatgcctgtctttactttagagggtctatagttatcctcttctgggtgggaggtcatacggtgcctttggtatgtgacagacagggtctgagtgtccagttttcacagggattgaggctgggtgctggggtcagcctctctgctggagtcttggttccaggactgtgactgtgccctcagcgaccacagggccacctctctgctcacattctggtgtacagcagagtggccatggccctcctgagcagatgggggtcttagtgagtgagctgaggggctcagagctaggccaggttcatggtgagggcttggtgacatggcggccacttttgtggttgctcatcgtgagtctgaagcagatgaggctgctacttcagttctgtagatgaggagacaagctacaaacttgaccgtggctgtgcagctggacagcgaccgagcctgcagttgcaattactgtgcttacaaggaaaaggagcggctacttttagccacggaggaccctgccccttctccccagtagccactgtgacctctcactagtctctctcccactgagctggcccccacaccacagattagaaccatggattgttctagaagttagatctaaccacaaagctttcctgactcaaagctgttgggagctaaggtgaagaccaaacggacaagagaggcacaaagggttttccagaggctgaacgaatagcagcccggaaagacaccccacctttgccaagagtgtttgcttggagttgtggtgaatccctccaggtcgtaggcctagactcacctccatgcccgggactgaggccagggctcttgtctgcagggtgttgtcctatggctcgctgaagaggggccgggaaagactaggtggctggctggattgacctctgggggccatgcttctgaagagggcccatgttgagaatctctgctggcctccgcggtggggcttggccacccgtggggctgtgcagcctcctgacccgtgtctgtgcctgctgcagctgaagcgctctcgggagacggaggtgcagctgaagccgctggtggagaagaacaaacgcatgaacaaaaagaacgaggagctgctgcacagcatccagaggatggaggaaaagctcaagagcctcacgagggagaacgtggagatggtgaggcccgcttcccgcctggctagactctgtggtccatgatctctgcccaccccttgacacctcagacgtgggctcagtgccggctggtcttgctcccctccacatctccacatgcgcactgccggagtgcctgctgcctcatcccctcattgtcccagaggaggacagggcagaatcagtagggcaggcttatccactggatggattatagcgcatgactggctcatgctttacgggcttccccggagacagttactgctgaaagggctgtacatgggggcaggttttccctctgcataggatgactggtgtctgtgctctggggggtttgtaagatactttcaggtccattgattagagtgcccatttcacagcttagaagactggggcccaggtactagtgtgggcagtctgtggtgaggagttgcctccctgcctatcttgccttctggcttttcattcagattagcccctgccccagccccaccagccattcctgtgagcatcactgaccacacctctggctcggcttcggccttcagctgtgtattccccatcttgggaccaggcgtctgtcacccccacccctgagccccacagcagtgctgtctttcacgctgtagcacaccgaagcaccctctctccttctggctgcagaaagaaaagctgtctgctcaggcctcgctaaagcgacacacgtccctgaatgacctcagtctgaccagggacgagcaggagatagagttcctgaggctgcaggtgctggaacagcagcatgtcatcgatgacctctctctggtacgttgtcactcttggctaagatgacaccacaggaggcggagtcaagagtgggcatcaggacaggagtgggacctgacagcccagcttctgacgctaggtcccctgtgatctccaggaagcagcctgagcttggttgaaatgagatcagtgctacctgggaacagtctccatggcaactcgcttttcagtgggctcttggcttgccctggtgaagaggcagcctggatctgttctgaggggcctttgagttattattaacttggattcattttttaatttagctattgcataccgggagtttgagcctgaaaatctgagctttatcatcagatcagagttggaaggaccagctgagactgtcatgagggcttcatagctgctcaggggtggttatgttgaaaggagaggggaaacgaacctgcagtagagaggggtgtcttattccaaagatagcgcccggcagtgcagtcaggcacatctgcagtgagcgcagaagcggagtgggctctgcttgctcacgagacctgcgtgggcatgatggttccatccacaggactctgaagggcgggaagccatgatcacatcctcagcgggttgcatgagaagcggtgcccgtcctctaccctcccctctctccccctgcctttcccacatagccagccatcttggcttcattacctagatgacataatgtagccaaggatgacaagacacactcaataaagagacaatgagtgaaaaggaaaataacaagccaaagcggggctggggaacagaatgaccagtctgccaggatctggtcagatccaggcccagctttgtcctgctggaggaaaaggagagtgtgctgaaagggagaggccctgggtccatctgggtccccagcactgccacccctgtctgcagtagaccccaaccaagcaatgctgcaggaagctcctagccccacacagcaagaaagaaacaactggagaaaattaagtcacccagccagtacaagggctgtgggggattccatcctggctctgtctagcaaaaagctgtaagcatccagctgctgctattgcaggtagaccctgccaaggccagcagaaccactgtgaggccacaccgcttgggcttggcagcctcaacccaaaaaagaatccaggttttggcagaggcaggcgaatttctgagttcgaggccagcctggtctacagagtgagttccaggacagccagggctacacagagaaaccctgtcttgaaaaaccaaaaaaaaaaaaaaaaaaaaatcgaggtttttctgtgatgagatggtccatcagggtgggtgacaaggacctgaacgagtgtcttgttactaggctctcagttgggtgcctgcagtgtgaactaggtcataccgatagagagctaagcaggcaggttggcgcactgaacctccttgttttaactgtgtggtcctgtgtgatgggggcctggttgcaagtggtcactggtggctgcatttctttgcaggagagagaacgcctgctgcgctccaagaggcatcgagggaagagcctgaagccccccaaggtgagcctgccacctcaagccagtcttacaggaggggagggtcacagggccagccacaggcccagagactgtgtgacacagctgtgtgttggctgtctcaaggctacatacattgtggcacagtaatgtgacccagatatggtaatttattcatggaacacttactaatgaaattctgtgtttggaccttgggttatgtgcatccaaaatttaaaaaaaaaaaaaacaaaaacatagatactcaggccttctgagggatttgaaggacactcagcctcattttatgcctcctaactctgtgttacgggatctcaggcgctttgttgagaggtgtggaatggagtcctttttgtaacatgtgactgctgtctcccagaggctgtctgggtgtgccatcaggagagagcagagctgggtggggagacttagaggtccccggggaggcttagaagaagctgtggtttgaatgtcagcccccctggccacctgtctgagatggatctctgctccttcctgaactggcacctggcagcttcgtcttctgacagagatggttagagaagtgcttctgggtaagaaaaactgcgaaggtatgacagcagatggccaaagacgtactccctggtggagtcagagtggcagcagggggtggtggggacaacccttatctggcccagaacacctaatctggcccagttggcacaaggtaggctgatggcgtcaagcattccactgtttaaagggaagcataagccttcacctcagagtggtggagaacgcctgtgtccccagcactggacaagaggaaatgggaagatgagagttcaaaactagccctctggctaattggtgagtttgaggctggcctgggctatatgaggctctgcgtcaataagccaagagatgagagaggggcagatccttacatgttatttccctaggactggctgaacaaaaatgggtcccttggaatgacaggaagttagtgtcttataatttgtgagaccagaagcctggcctcaaggtgctggtgaggccaggtctcttccctcaggcgtctcgtccggagggcccccttttccatttcctccagctctggggtgttccagtgatagtggccgttccttgcactactccagtccactgctgggtcacactgtcatctttagggacaccggatgtactgggttcagagcctatagtgcctcagtatgaggcgcttcttcaggacctcttgcatagttatctttgcattgaccaaataaataaatacatacatacatacatacatacatacatacattctgcagcagcacagtcaggaaggacttcagcatatcttttgaggggacacaatttagtcataatacctttatataaaacccaaggatttttaatgtggatgtaaatgtcagaatgcagagcgtgtaaaatgtgtctctgagccatctctgccccgccccgccccctccccgggtagccagtctgagttcagtctgtgagtctgagctcatggttgcttggattaattagtggtcaccccactatctcaattcatcctcagagccaccctggctcttccagttacgggagacagagatgtagagatgaggatgagccagtgggcagatggggtcgagcctcggactcactgtctccagcaggctgagctgagtcaggggcaggtctttgtgtgctaatcttagatgctcagaaggctgtgtatgatgctgcacgcctttaatcccagcactctggtggcagagggaggtagtttgagaccaagttggtctccacgtataacaagtttcaagccacctcagtcagggcttcctagtaagaccttctccaaaacaaaacaaaacaaaacaacaaacaacctcaaaactaaccaaccaaacaggaaaaaaacccggacaagtaggaggtccagcatagctgtttgcattcacagacctattgacacccaccttaaaaaagctggggaatagcaagtgatgtccccatggcttgtccccagggtgggccagagtctgtcctacattcacctggcacttagaatgtttactgccacgtaatctgctgaatgtgtgggccatacacttgttcagcgctgcaggcttgctcactccctcctgtggttaggaggatcgctgcagtacccccacacgatagccttcagctgattccagtaactgtgtttagtgactgtacaattatttgcctgccctttccccttctggggaggggggagtggcattttgctctggtggtaaatgtcactgaagtaaagtcactttgagcagaaagtctggctggttctggctggtaccatctccgtggttgcaacatgggcctgatggggagaaagcgccccctgctgccagaagaaggttgtgacatctgcaaacagtgcttgtgagacaggagttaaactactgagggtaggtagatggttggttcacactgcacatgtgtggcatgaaacaatccataattaaaggttaccaagaaacctgttgtgaggtaagattacttcaagcctacgtggcctgtgaagccttagtcccaaaccctagttttgaaacttaaaatgttctcagtatcaaataaaaaaaaattcaggttttggattctggattagtgatacttaactgataaagtctatttaaaaagaatcctgccactcagaaaaactcagcagttgtaagtacttgtgcttccaatcgtcccagataggggcactcggcctgtcttccactggtcctgatctctgaatctgctgattgggagagacattaacagcacagcacgccagcagtgggggaggggggtgcgtgggggggggtgcatctgtctccaaagagtgcctggcaccgagcagggggctgactgactaggtgcacagcctctcccgagaagtacgtttgcaggacattgcctacctcagagacgcaggggtgtgtgcgtacgttagtgccaaccctagaaggtcgggtgtgggaaagctgtacggattctgttttcttaaaggtaggattgcttatagcccaagttggccttgacctccatgtgtagttgaggctcctccggccccacttcctgagtggtggggttcctggcgtgctccaccaagccctgttttatgtagtgttggaggctgatccaaggcctttgtgcctgctaggttagcccttcagcagttgatctgcatccccagcccatgggaagtggcttccctcttactgtttcctgggccaccagcatctctttttctccagattcgtgtaggctggctttcatcccaggatcctgctttttagcccagccctgtgcagaccgggtggacaggcggctttgcagctttgggcttgagcatgattgtactcttccgtgccccattggtgcccttcaggcctggtgcatcctggtctcctcccacggctgaagtactgatggtttctttgtctttccctataagtgcccctccccccttttactctgtatggtgtatatcctaggaccatgtcaggtctccagcttcacagaccatttgaatgaattcattgacacttacaaaacttttcagaagcctcccagatccatccctgctcttgactcctgacacctagaccctagggaagcctctagactctgaggactcttgtattagttaactctcgttaccatggagaccaggtgtctgccagaaacaactttagggaggaagggcttgggtaggcttacagcctctgacggcactgtcaatcatgctgagttcgttgattctgggtccctcctgagccaacacatcatgggagcaggagcacgtggcacgagctgctcatgtgctgcacaggaagcagaggaaaggcatacaggaagggatcagggcagatacagtcccagagacactccctcagtgacccgcttcctccagccaggccccacctccaagtttctaccacctctccaccactactcaaaacctgaagccatctgatggctgtagtctgatagtctctggaggtacacatgactctttttttcctgggtgtttatatcagtccattcaggtggacagtaagattgaccatcatacaccctgatgcacaggtaatggagacagggcagtgtccccagtggtggtcctcatatttaagtggtctccacagtcctaaggacttagtgtcactctgggcttcccaggagcgccttctcccaccatgggattccctctggggcaagactatgctgactctctgtgcctcctgctagtttaggccaggctaacatcagttcctagtgagaggtacaggggaaaccctagttgatttcttgggccctgtcctggagtctagggacctttctctgcaggggtctggcagcaaggaggcctcaatatgggacaatgaaccggactgcaggctgtcagtagctgctattccatagccatgtgaattgaactctagcagagctctgagcacatgggtgatggggatcttgggtgtagctgagagactgaggcctggaatgttgagcagtcagccccagcacaaactctgaggcctgagacaagggcataagctcctagaacctgcttcctggttctcaaaacgaaatcacattcagaccaggagatcatactggagacctggttctgtggctgaccatagttggtaatcaagaaatgattgtgcctccttcctcccctctttgtcttagaaccttagccttgctgcatgttctagtttgctttctattgctgtagtaaacgccatgactatgggaggaaggaccttgattcagtttacgggttacagtccgtcatcgagggtggtcagcacagaaactggaggcaggaatctgagcagaaactgaagcagagaccagagggggcttttagctactggccttctctctggcttatgctcagctagccttctacaacacaggacctgctcaagggtggcagtgcccagagtaggctgggcccctcccacattagtcaccacgagagttcttcacagacgtggctacagggcagtcctatcaaggcagttctttaattgaggttccctcagacggttcagggctgtgtcaggttgacagaggaggcgagctaggttattgtggctgggccaaatgcagatgctcaggtccccgcaatccacagtgtagcctttgagacagtgtaagtatcctatggtggtgtctacccaggaaggctgcagagcctgctgggccacgtgcctgagtcccctcttctctggggaccttggcttactgccagcagtaagaagttcatgcctgatgtctggcagatccttctggcgcattgttcctgagtccactctgacatcacatctaggagccctacaaaccaaaacctgtgcctagctgcttgtggagggttggggcagaggaacactgggcacttccggagcagactctgctgtggagtgacttcccgcctaagacaccctactggttttcagtgtgatttttgcttctcagcagccaaaagtgcttctatccctatgttagtttgcaactgaacccgtttgtcgtcagtccttcgccagctgttgccctgagagcttctgtggcttcatcctgccctgtgtgtccctgaggcacgacggtagcatagcatcctacaagcctagagattcagaacggcgactgcatgaagcggtcagattttatgcccaacttcaatgcaaggctggtccttggcccttgtggtgagaggtttcctagtggcacttctctaagggctgtatccctaagtccaaccctggcctctgtctgggcgagggactgatgacttccttatagctcaggaatcatatccccctcccccaattctctgtggtggtttgttgcaggttgtgtacgagctaaggtaaataaactctgagagccacacttcggggacaacaggggctgcgtgtgccaggacacccacggctggcggtggattagtttgaagatgtcccaggcaggcgagggaagagatgccccatcctttgtggctctgggcctgaagcagaagactctcgtcatgataccgttgctactgctgtgcccaaaggctttgcaactatccagggacctgggactgttgacaacagttctgggcatagggagattgggtcctaggagagaagtccccagaggacatgcaggtttagaagctgtgctctatgacagatacctggggctggcctggaaactggctgctctccattgatagctctgtcaccggcatctaggagctggtccaaggtgccaccgctgttgccaagggtgcacctttggggcgtccctgtcctctggcttctgctgctgacactattcaggaagctgtgaggggcaggtgtgcctgttttctggggctggagagaaggcagggatggcctgaccagccagtacaagctagttcctgcagcatccccgacagacatggagtacatcctgtttgtgctctacttctccttcttcctctgcctctgcgccctcgtgtgcctgtacttctctggctgccaggagatgacctataagcatgaaggtacgcagctgcctaggatgggagggtctgtcttggtgactcctggctgccatctgaaggtcctagatcttctgggcaattttggctggatgctgggacggtgcagagaagagctggtgagatgctgggtccagtggaggtgtgtgtgtgtgtgtgtgttgagtccagtggagaggtgtgtgtgtgtatgtgtgtgtatgctgagtccagtgaagatggttagtctgtctttgtctgtgtctgtctctgtctgtctgtctgtctgtctgtctctctctctctctctttctctatctctgctgaatccagtggagaggttagtatctgtctgtgtgtgtgtgtatgtgtattgtatgtgtgtgtatgtgtgtatgtattatgtgtgccaagcatgagcttgtgtgtatgtggagaagaaagatttgctctaaaagcattttggtcaaaattacacacacacatacacacacgcacacacaaacacgagcggctcgagagcgcacaaggtctcacgtagctcactgtagctagcttcaaacttaaccatgcatctgaggatgacctttgaccttgaatttctgactgtcctatgtgtcctgtgactcacagctgtcagctcttcgccccacagccatgcatggcacacttggtgtacaccgacccagatctccatgtattactagacaagcaccctgacaactggactacaccctcagcccccaacctatgttttaaactttggatatctttgtaaaaatgacactggctggactgacttgtgttgtaagcaggatgggtgtctagaggggcaagccccttttcacagtcagcacacttggtgcctgtgaattgtaggaacttttctgcccaatccaggaagtttagaattaagggccacaggccacttggcagcagacagcgggcaacatctcctgatggccctcccccgcccctcgggaagtgagcgtgggccacctcagcgtatcgaggaagcagccagaacaagtttcctgctctgaggacataggcactgtgttcactttaaacaccaaggtgacttttctgttttgtgctcttagtgaggctgtgctgagtgggctggctctgtcagcttctctgtcacctcatcacctagacaaaggagctgtctgcaggcacacacctgtaatcctgccgtttgggaggtaggggcatggagggatggagtttaaggcaagcctggactacatgagacattttaaaagaacacaaagcaaagctgggcagtggtggtgcacgcctttattcccagcacttggaaggcagaggcaggtggatttctgagttcgaggccagcctggtctacagagtgagttccaggacagccagagctatgcagagaaaccctgtctcgaaaaaccaaaggtggggggaatacaaagcaaaaaggaacctctaaaggaggcaggctaggccacccgtgtgtcctgagagctgggcagttggcactggataccagctagctcctggtagctgaggaagtggatggaccatgcatagttactgattcccctccattacaacaggatttcactggaactattggtttgtgctggcttcctccctgtaagtagcttctggcttcccctggtataacgtggctttctgcagccccagtctagggccaggtctactgtgaggctctacctgggcctaaccttgtcctattcagttgggagcttgagcagttgaaaccttgtgattaggctctgtcattgagcgcttcattaaaagccaccctgttcttcaagagcagattagcctaggcaattgacctgtgttactagccccagaaacttccagaatgctaacagcggatggtcgtagtccaccaccacatcctaatttggggaagtgtgtcattttaggaccttcctggggcccacttggtagaagggggagcagagatgtcactatatcaggctactagttagcacagccaacacacagatctgtccccagaggacaggcaattagcagtgtttatgaaaaataaggttggctgggcagcagcccaagggaacagggatgtggagctcgagtcagagtgcgctgctggtgtggactccactgcttcctgttgtctccaatgcctgcagtggtagggcttcctatctgatgggaggggagatgctgaaggccacttggactatatggagcctcacctggtctcaccatccttcctatcagctgggtacagaggcaggtggatgcccagcagatgctggccatgtgaaccttcaaagaggtcacgagcaaaccccacaccatatgaggaacattctggaggggaatgcttgcaggggcctggtagagcctctgtagaaaaccctaataactgtccagagtgactgagaagtccctccctgccccttccctgcgatgtcaaagggacttcctcatggcgttgttgctgggggctgcagcctctatgttctcgtatctgcacatacatgtttgctgccatagtggcttgggtgtagggtacaccctgcctcctctgtgggttaaggagaggtgtgtgactctctgggagtccctgggagcccagagctgatcgctgcaatgaggctcctgttctctcacagtcctggaaagcacactgattgggaaggcaagggattccctcgagcagggtgtttggaaggagaataaagagcagtgtgccttgagccaggaagaggggtgcatgtggaggtagatgggtgatggacacagccctctggggctagtgctccctagcaggtaccctacctggctttaatcgtgtgtctccaggctgagcctggtctggctcactgaagctgctcagccggtgattactgaacgagtgaatgaatgattgaacaaatgagtgaggggagcctcacatcctgtgcagtttggagtgagagaggtgtagccaaaagattctcaggtagttggcaaacaggacagaaagatgatctgaggttatgagtacagggcccttaatgttattctttctaattatgccagtgctctgaatgcattgtcacccaaagctaagaggaatcacctcttaggccgagctgccggggaagatggggtcagaattctgggtctcctaatcacatctcctcttcctggcatcccatgtatctgctccttctttggggccagacatctcactcagcctgtagaaagctctgggtgctgggacttagctaagcacagagtgagtgaggtcccctcttacgctggaagggggcatttcaacagttttcaggagggacctagagctcagaggacctggcatttaaagccaactgaagagttgcatagccccctctgcctatgacccctcctgccacctagtgatcattgctatgctagccgcatctgcagcagacttagtggctcgctcagtcctgagctggctgtagatggggccacagctgcctcagcctcagccccctgtgccctgggctggccgtgggtaggcagctgctgtctttttgacctcgtgctccttgcctctcacagaagcatgttgtggagacattttttggatttgatgaggagtccgtggactctgaaacattgtccgagacgtcctacaacacggacaggacagaccggaccccagccacgccggaagaggacttagatgaggtaagcaaagtgcaatatgctagggacgtcacacctttgtcttggccagggctgctccctctctgctggtcaatcctgccatgccttagagcctcagagcaaggaaagccaggcctcgctgcctagagagcacccagtgagcacctccctcagagctgatctcctgggagacttaaggctgctagagcaacacccagatgctgcccccagtgctgcttacaattgcaggtaaaattacacgtctcgtttcatatcccccacacataggtgacagaagtggtcacagttggtgactttcctaaattataggcagtatttaatatagactttcccctggtgctgcagctcacaccaggcttcctctgtgtgtctgtctgtctgtcctctgtgcacccctcagtggcagtcccctgagcctgggtgagaggggtgcactggccctggctgtggcaggtgctggtggagctttctggtgtcacatgtggcctattgggaagctccatgcagctttctgcatgagcctaggattgcccgtcctttgtctccttgtcctagctccttgagcagctgcctctcacggtcccatggttcagggccattcaggctctactatggagtgccttcttgaatggtgtcaggaccctcaggaagatggacccttcctccaagtcagcccactggccttaaattcagttgcttatggagtggcctacccatatgggaaatgccacgggtgtcacgtcctgtctgagcatctggctaaaatttggtccaatatgatctctggtttttacaaacttgtcatggtacccccaacagtgacttgctacattagtcaccctgcactgtcctctcatgaccacaagggggcttcacacagaggtgctctccagtcacatgccagagcagaaactcccagactctcttggccagaaggacacccttctcagggtgagcctttacctgtcgagtcaggctggctcccaggaggcctgtgagtgctggggtggcgtgctgaagtggaggaggcattttctccaagcagccttcactccaggtccttcctgttactttctggtgtgacaagctcactaggcatttgtagacacgctggagagacgtgggcatttactcgtgttttgactctgtcccttggagtcacatgaagtcacgaattgacttgtttgttttgttgttgtttggttaagaccacaaccagagaagaggctgacctgaggttctgccagctgaccagggagtaccaggctctgcagagggcttatgccctgcttcaggagcaggttggggggacactggatgctgaaagggaggcccgggtaagtgtgtcccctcgttgatggggagggacagagactggggaccaggaggggagggacctagaatcttgaaactgagggaggtgaaactagaccctccacttttcgtctgccgtctgtttgcaagagagaagacttacagagttgaaggggtaggggcagatggacagacaaacagctgaaggacttgatgccaggcctgatgaccttagttccatctgccgaacccacgtggtagaaaaagaactgattcttgccagttgtgcttatgacctccacacacacaaacacacacacacacacacacacacacacacacacacacacacacacacacaatgagttaaaatagaatggaatttgaggaagtgatgaagttacagactcagccagcctttcacgcttcagatctacccttctccctgtagagccaaggctcctcccccctcatgcccagtgtcttcaggaaacactttcaggagttcttggagcacccaagacacaggtactacaggttcaggaaatacattgtggtactgggatgaacttttctggaaacttcctcccgctaacccttctcccaccttgaagtctatagtatttgcatgtccctctaggagttccagagacaccagggagcccatgctggtttagtgctgtcccatgttccctgtctcactcccatagccctattagctgggatgaatcgattccatgtcctgcagaaggaacagagactcaggaaagtagcaacttgcttgaagatgcccagatggtccccaacataaccgggatctgggactgtgcaactctggctcagaatgggagccccatgcagacgggcttgggtgtcctaaagcatacatgacactgtggtttgtaggtctcaagaatatggaaggcacgggcatgagcaaccatctccagaatgaacttggcactcagggatcaggatggtatcagtctcagggtgtgggtggggcagacacacagggaacaggatccccaggggatgtagccatttctgccataatgaatgaccagtctttctttctggaccacagcaggaaaacgtctaggctttatctgtgcttaatttcttcttgtcttttaatgtcatccacttgcccagttaatggagatttcacagtgaaatgcacagtgggacatggtggtatatatctgtagtcccagcacttggaggctacagcaggaggattgccatgacttggaggccagctagggcaacatagtgagtgctaggctagtctgggccatagtttgagaccttgtttcataatttaaaaagaaaagggaaagaggtagattttcccactttccagatgaccttgaactcctgatacacctcctgagggccaagatttcaggcctctgacaacacacctagtttgggttcctgacatctggaaagcaggtcacatccgtgtcttcacattccccgtgtcaatgtgtggctgtagccaagtagctgtgcctcctgggactagggtatgtgcctacgctgtgccctgcctgctgcttcttgctgtagggtcagctgatcagtgacttccttgatgacttgcctagtttatgaggtattaggtttcggtctttgctgtaggtgacagaaagccccattagacccccaagcaagtagaacagctgtcagcagctggatgctgctgaaggagaaagcactgaccttgtcagagctggctttgggaccctgaggcatccagtttgggcaagttcatcccagaagagggtggctcttcttgcaggctgccctttgattgtcctttactgggggagttagaaccatcaccccccccccccatgaccccttacttcccactgcaggatgcggctgcagatggacttcagaacgcctcaagtggttgtgacgtgagcatgcgtgcaacaggaccctcctaccctcaagctctctggctgcggaggcagtctggtcggcagcctgactcgttacctctgcaagtgacttgctcacttcctggtctttctacttccagactcgggagcagcttcaggccgacctgctgaggtgccaggccaaaatcgaggacttagagaagctgctggttgagaagggacaggtaagcaggaaggccatgcactctgtgatcctcatggctctgtccccatggtgtccccggggtcctcatggctctgtccccacagtgtccctgggatcgatgttgtctttggtgtgccaagggtaaggggcggttctgtggaggaatccctgtgaccccaggtgaacctgtgttgccacagtcagagcgtggtgccctgaaagcttgcctggcttctcctcggttgcccacatcagaaaagcagaaggtaactctcagagcagagacgcagccagaagctcttttgactggggctggagcctgaagaaaagctgctgttttctgtcaagattttaattgcctgtgcgtaattgaagtgctgtgggccacttggcagggcccatagcaaagggctgaggctgtgactccgccatgggagtctggattggttatctgcatggactcccctctctgatttgcttagtccaggcccagtgggcatcaggcagagagaggcagccctcaggcctttcttgttggtgcctcttgtaagcagagggttatctattttacacggttccctagggacccagtaccagaggtgccatcttagaacttatttcctggcaacagtcagcgggttgaggagactttcactgcctcagaatagcttactggcacaaactagtcacatggccccatatgggtctataaaaggctggtgcacaggcacaggcatgggtttctgtaggtccttgctcctgctctcagtgagagactgaggcatatggaaaggtctctggcctctctctctctctcctcctctctctctctctctctctctctctctctctctctctctctctctgtgtgtgtgtgtgtgtgtgtgtgtgtgtgtgtgtgtgtgtgttgtatggtgtaacaagctgcctctaaacgtagttgcttaaatagtagggtttgatttgttcggagatctgtgaattggtgccaggctgggctctgtaaatggttgttctgttggtcttgcctggattgccctgaagcttcagtagtcaggcaggtcaaatggggctaggcagaagtcaggtaggtcaagtgggactaggaggccttaaatgagatcacttgccacttgtggtctggttatccctcctcccataggtgttctggcttttttatctggtcgtctggggtgaggaacccccttctgtcaagcatcacgaatactgaccaggcctctgctcgcatcacattcattagtacttgagtaggcaaaacacatcacagccaagcccagcttcaaggctggagtaacagaccccatccctttggacgatgagctgacttgcaaagcatcttgtacacacagatgtggagcaaaggtcgcagccacccttgtgaccagtccaccagacaggaaggtggatggacacagcgctatcttctcagggacttgcagccacacaaacatacatgcaaagagcatgtatgcaaatgggtcagcagagacacagggtattaggtagaaggccccaggaggtgaccttcaaatgtcttctgggcattgcacacctgttggtcagatcctaggtccgccttggctaacgagcattgctgaattccaacactgggtgagactggctcggctcctgtggagtgggaatggggggcaaggtggaggggatagactgttctaaatctaggatgggcaggatcaggaggtggaagaggaggaggaggagggaggaggagaagaagggagaagaagaggaggaggtggagaaggctcccttacctcctgtatcttccccctccagtctgatgctgatgagggagagccagtgttcgtggctctggcctgacactgaggatgctacggtgtcagcacagaggctgtgctaatagactccatgtgagtggagttgagcaaagcaccagtggggaggtggaaagcccttttggttattcactcagccatcacggagcagtgtcctgtaatggcccaggggacctcgagcctatggggagagagctaggaaagaatgacatctcacacgtggggctagggggccttaaataagctcactcacctcttgtggtccggtcacccctcctgctgctctgtgctctcaggacaattggaagaaccctgttctttcctggctgtgaaggtttagaggatgatgaagtcacacagccactgtccatatctgggagttggtggctcagtcaacacgggaaccagtgaataaataccctgtatttcctgcaggacgctgcgtgggtagaggagaagcaggtactcatgaggacaaaccaggacctgctggagaaggtatgctcaggccagagcctcagcttcatgaaccgaaccacagaggccaccaacctgccccaagccctcagtacaccacaaagaccagggctccatgacatagtagttctcacaggagaagggtctttcccactggactcagggtctgtcttctgggacataacccttaggtcttagaacctttagtgtgcctctacaaaacaggaaagggtgctatctccctttgctgttgatttgggagccttcctattcctcatggggacacctgaggcagacagagtccaaggcaggtcctcaggttccctcagctggctcagttcttgtattggagcctatataccttgcgaagtttgaagggagttggtctgaatgtgcgttggcatggagattagtttttccttgcttggatgggtccattcagttattgttaaagtagatgccaagctgtgctaccatgatcccagtgcccatttagagcagtttgagcctccctcccccatgcctgtttgcagtccttccttctccctgctttctgagtcccagtatatttgagctgtgtgatcagtagactcacgccctatgcacacttcatgccagcagaagagaatctagggtggtccctgggtcttcagcatcctgaaagcccaggcctgaaccgccaaggcccatttctcaggaaggtggcctggatctggcccagctctgctgtgtcaccttccctgaccttatcttccttaaggcattgaggggtggctagtcttggctgcctggtgggccctgtgtgtcaggaaggctttaatggctgttacctcagtcccacaggccacacaagaaactcagtgtttcctggtgtctcctggggttgatagcccttctttggtcttctgacagaaggagagagaatagctgccacctggagcgctcacctgcacatactggtggcctctctctgctgtaggttgtaggcaccactgttatcctctttgggtggaaaccgagggtcagagcaggttctgagctgcattcctaagctcttcccaggctgctctgtgtaatcagggcaattaatgttctcttaagagccttttggggcgttggagacctgcctgagccctcacagtgcctgctgtagtggcctccacagcttaatcctgggcctggcttagaaaggtctggagggctctgggtactgcaccccaacactgcactcttgtttcccttatgctgaccacaggcagggactcggtagccccaggcttcagggccccaccactcatttgttcagcgaaaatataaggagtttctagtctcttggtctagggttagtgctatggaggcgagctcagtccagcaactctccctcactccgggctcaccagcagatggacttgtggccagctctgcccttctctcggtgcccagttccctgtttctctcagactacccactgatgtcatattgtagttgtaggatcccccggggggtgtgggggacaaccacggaggccattaatgtcaaggtgtctttgcccagatttacagactggagatggaggagaaccagctaaagagcgaaatgcaagacgccaaggaccagaacgagctgttagaattcagagtgctagaactcgaagtaagagactctatctgttgtaagctctcaaacggagcagacattctctttgagcccaaactgaaattcatgtaaagctccctgccgttcccaagcatgtgtgaagggacgtgttaccgtttctctccttccttcctccgttcttttcttcttcctctttttttttttttttttttaaaaacaaaaaacaaatctgtatgttcgggataacttcactgccttaacgtgtcctggggaggatgcttgcgacgtctgtggacctgtaccagagcaatctatttattgcctaccgcttgttttgcacttaataaaataagttgtttttgcaatattttgccttttttatttgtgtttcatttccataactactatcctgcatgcagccgctgggtgtgccttccgcaacccgacagcagcactgttgcaatggataacacacctttgatcttgcatgcagcaggcctcttctgagatagcagggtctgccccagctggctctcttgatctctgctgtgtttaacagcagtgtgggcccattttctgcctgccaaagcaaatgcgaggtaagtggaggcaggcaggaggatgtatttacacaaggtgttaaaccggctactttgctcaaacccttctggccagtaaatacaaacctgggcactgcaggcgtttggacttaaattatatacgattcaaaccgcaactgaaaactcccagacactgcacgcgtagaaaccttgtccttctgggaactccacagggcagggagtaggactctgaggaaacacttgaggaatttgttgcttccagtcagaatcgtgcgtcaggtgtgttacggtattgctcggctctcacggcccctcatcctcccattctgcttctgtttaagtcatgagcatcccaaacatctctgcacttggggtgagcctccacagggctctgtgacactcactgtgctgcttccccagctgacaccgttgttgcatgtatgacttctctccatccacatgggcgccttctctcatctgtggcttctctggcttccttttctttccttctgtggcccaaaagccttgtcctcctggcaaggacgggccaggtggctttccacttccgttgtcactgtgtctcagttctaccctttattcttccatctgaagtgagaagtcacgaggtcatgcttagtaccccacggctgtgagaatgccttccacaagtccttcgctaggacccctttcactgggagctccagataaccacatgctttgccccagcttcccaacggccttcggagccactgggaagcaggtttatgactttgttcatataaaccacgggctgctccgacaccccttttctgtgaaaagcccattgattgagtacctctggtggcaggtgtgtgggggaagtacgtggttgtctccgtcttgtctcttagaacagtgcaaagtgaggtgaaccagctggaggcttcctgaaagcccactgtgaacagcacccagccctcccctcgagcctcactcagtgtgttaaggcatgctttccgggttcatcacttctcttggtatgattatagaggtgtcctaggtctgtaattgccgcacaccccctcccccagagcagcttgacctgatgtagaatttgagagggtgccaacccgtcataactcatctgccagtgtcatggggcttaaagccagctccatgtagaaaatgcacaggggaccagggtgctgttctgccaacatgctgtaattcctctaagcaaagaggttcccttgggcctcccataaagtgctcataaggtgtatggctgataaatgtctcttttgggacatctggccataaatctgaggtgtgggtgggggcgtgaagagagtgatcacaagtcttgttagtatgcaccagagaaacaaaagcaaatttaaaaaacgccaagctgagtcacctattatcatggaaagcaaggagagtcagaagtgggcccagtcctgctactcactagcaggggacctcaggctcagccatcccaagcctccgtgggtatgtgccttgtgaggtagcctggacatcccttgtgataaccaaagtaccctgcctagaatatcccccgtggtggctggcttctgttctctgttgaatctgatacactgtattgattaagcctcctcctctgtgacttctggggtttggattgcaacaggcagacctgtgaggcccaatcgtctgtttctccctagcggtaggagagatgtgaagcttccaaagaggcaggaggacaccacgtgtctcatgccaggactgtgtggtccagatgtgtgccatgtagctcctcctttgctgataacttgggaagatggcaagaggtgaatagcagtcgagttctgtctttaaaccacgtcttttccccaggagagagagcggaggtcgccagcctttaacctccaaatcaccaccttccccgagaacaacagcagcgccctccagctgttctgtcaccaggaaggagtaaaggtagcatgcttggggggcggggtatgtcacatggacctgccactcaggggcgggctgagtacctggcgcggtggtaaagggggattgttaggtcagggacagagccagtactgctgtgttgaaagacagagagctaggtgaaaggatcatgcagggtttacccttctgcccagctacaggaaggctctaaacccaacctcgcaacgggctgtctcttatttgcgcagtgcccagcccataaccagggctttgctgatggtgactatggttggccacaggcctggtgccccaccagaccccacaggcagagtcctcagatgcccatgagcttagaaagcagggttgtactagagtgaatctcagtatacgaaccatagctacaccctccccacctgcctgcgcagagccagaggctgggccccaccgtggcttcagagcagaaggaggcgtgtgatccatggcactagagtaggtgtgggttgtatgtgcagctcacacgagaatgaacattggacatcttttccagggtgtgaatatctctgaacttatgaagaacttagatattcttggcgataatggggtaactatgagcggtcggttcccggttccgtgtccttgttttgattgtgtggctttgttttttgtttttaatttttttttctctgatttaagagatctgagaagtacaagggaaggcttttgtatggccgtgtccttgtgtgggtggtggggtctgtatttgtcagagtggggttctgagctgaggacagccttaccaatctgtgagtgaacaggggaccaacaaaactaaagactaagggacatacagacgcaaggtcccgtactcaagattgccaaagtcaaaaggtgatgtctttgccttctgaaaagactgtctttaatgaggcactatttccccaagtgttggttccactttgtgacctatctccacctagagggactggcgccatgtccctcagatggctgacctcggctggttgttgattgggggctgattgtcgtcggcacccccccccccaaagggcttggcactgactgtcttccgtgtccttggaacccagtgtcaacgcccttgcccctttttgtgttgtagaatttgaggaatgaagagcaggttgcagtaatccaagcgggaactgtgcttgccctctgtgaaaaggtagacctggcagtgtccttgtgctcacatcttgtcccagcacccggcaccatagcagaaactgtccattagtgtgtcgctttatttgggagcatgtgtgtgggtcagtctgcgtctgcatgtatacatgcatgcctttgcgtgttcaagatggagcaccacacacgctcactgcagaaagccttgatgctcaggaggaaatgcacaccaccctttgcaaggaaacaatctgtgatgtctgctttatttgcacctattggctcccatgcgcattctctttcggagtagttaacatgctgtgtgtccctcctgcttgctaagctatctggagtggctcatagatatgtattcaaatggcatccatgccattccatcacgggtacccacagagaacctcatcacctttcagtgagtcagcatccggagagtgcccactcttccctaatttaccagtgtgccctgagggacaacttcataatacatgtatgtatgcactggagagcccacccatgcattctggaacaggaatcccgggcagatagtaagaccacttgtcagggtttgggtagggcctggagccataacctgaatggtctatttccacatataatgtgtcttttactaggaataaaaacatgggcagttggtagacactacaccctgtgaggtcatagttgcactgtgtttgagtgggtagtcagcatggtgagatttccagtggcctcagcagtttcttcttccttgtgaagtgtaattatgtttctttggaaggttttctattcattcattttcctgcccatccatgtatccatccatccatccatccatccatccatccatccatcccataagcgtttgttgtaactgttctttctgtgtatgctttgtgtattaaagatgctaaatttcgactgttttttttttttaacacatcctggctttcgtgcctcctacagtgacctagaatattgagatgcacacagcttttagtagagtctttcctgcagatcttttcctttcacacagtcagactctgaaatgcaaccttgggatgatttagattggattcctgccacagtcctcagtagggcacttacaatacagttttctcccatagggacctgttcatcctttcccagccttcagccaaggaaaggacacaaaacactgacgtgagacactgtgatagtgctttgtcccaggtcacatggttgggaagggtggtggctgggtggcactctgagctttctgtttctgccccttatctggccaagtttgttttctccagtggacagttgggtcagtgagtcacacttggctggttggaggccatgagaagcgagtgtctaccacagtgctaggcagattcagtatatgactgctgtcattagcaaaatcaaatgtggtgttccagccctttacaacagaggctatatagaattacctaagtgctgactaaagatacctatatcagtatagtctgcattcatgtagcctgtcagtgttcagttcccagcaagtctctggagagtgaggaagaggccaggtttgcaagctcccttgtttccaaggagacctctcctagtttgtgtcttgggtccactacttgctgttcaggatctgatggacagagtagggccagtctatgacttggggtgtctggttcacagtgggctaggatagtggacattggtaggtgctgtctctccagcccctggggtgtcccccagggcagggatgtcatggtgacaggtggagacctcactcagaacaggtttcaggccgtgcaggaccacacctgtgccagcagcaatgctaagtccagtactgtagaaccccaggcccctcaacctcttgcaatctcttacagatgaagaaaggaggcctgtctggcatcagctagtctctgctttgccacaccttgcccacctctggcttgtactctacccacctttgccagcttcctgccagctgacacccatacgcttctgggcaccatcgccccacagcaccggcctgcctggcatttcactctgtgtcctaaatactagagggagagcctgactgttgggctgccagcccctcagtgccccatgagagcaggagagagcagggggcccatggctgatacctgtgggcagaactctggccgtcatctaggttctcctcagacttggctctgccagacgccgcttcagccgtgtgtctgtgaactaaagtgaagccggtgtggatgctgctgcttatcctctcattgcgtggggaaaatgttcacgagtaggggtgggagcatattgggagctgggtcatgggacccctgaggatgctagcccggtagccaagatagtcttttctagcttggagttggaggttccctgagatgtggacatcatagtgctaaggcagggacagtcaagaacaaaaagagacaagtgaccatagagacacacggtgccagcagtatggatgccagagaacttggttaggagccctagaaacctctctccacccaacacaccccacttaagaacaaaaactgtcatttggcacaccaatgagccccagcccagctctctcttagcagcactaaggacatttcttggtatttagacagagtgcatcccagtctggtcaggtggtccgatatataatggtctcacatcagtcagcaccctgcttcttgtcccttgtgtgtgcctttctcctgtcctctcagaagttttctcaggctctgggcggcaggaacgacccatcagatttcctctggttaactgagcacaaggccagcagctataccaagcttaaccttagcccaggtatgagcctgcacaaagaggctcaaatttaaaatgtgaagggtctgtggctcatttgtggttcccagtcagacatgcctcttttccataaagttcaaaatcctttgagaagtaggcacagacctcaggaagatgaaaaacacttcaaaaaaaaaatcaaaacaaaaccaaaaagcccactatgttctgttctgtttgtaagtaggggatgggggggtcaaaggatgagacctatttaggccttcagccaaagtgaaactttcagagctgtccctgagtcaatgtaggggaagagagtatccagttatagaggggtttcaggctcttcacctgaagatccttggcatgggattcagagagttgacgcgtttgaattgcatctgcctagacgacacccagtttctggagcatccccagtggccaggttctcctgcttcctgtccagccagatctcttccctcctggggtgggggcagtctccccaggagagtatgagatcagtggacagaaaccccagtcagcaacccagaaccgagctttctctttgtgtcttgtcactgtccttggtcctgaaaaaggtatgtgtggtttttaagactggaaagtcctgctcccctttgaaaattaatctcaagctaacatcaaactttgaaaagcacagtgctcagggttggaagatggtttagcagttaagagcactgatggttctttgagaggactcaggttcaaatcccagcacgcccatggtatcttacagctgtttataactccaagatctgactgacagatgcatgcaggcaaaacaacaaagcacgtagaaataaacaaacattttaaagtactataaaaaagcacagtgttctaaactcctcatcagaaacattcacccttttcacaagaagctattacacaagctgtgtgaggaggggctagctctacacacgtctactgcttgtccctggggctgctcagggccaagctgaccttgatgttgtgggaggaatctctgatcatgtcttttatacctctccaacctctgtggtgtccacctatatccatgctgcgcctcctccactccacagagatgtctttgtcaccactgtgtggttgactctgccctgaaagaaagccaacgaagacagatgtgctcccaccatgggcgcctggagaaatctaaatgggtaatagtgtcctcacctgagcaccaggaaaagatgaccgtgtggcctcaagaagcagtagaggcttcttaggggagaaggtagagctagcttgagagtggtgatctgggtagatgatagcttgacaaagacctggggctgatgctgaggtctgagcttccgatgtctgaggagcatgtacacaggccctgaggtgaaatatggctcattctgtctgaggagccaagtgcattttcagacagctaagatacaggaggcttttttttttttttaatgggggttagtgacaagtagggaacgtggaatcagtgcctcactgtgcagccctggctggtctagaactcaaaaggatctgtctgcctggccttccgagtgctgggattaaaggtctgtgccaccactcctggccaagcatgggttttgtggtggcagaagagcctattgagtgaccacagtgatcttcaggaggacaaggctgtgttggtcttgtccctgttgttaggagcagaggatgtgtggtgagctctggatggggtcagaaaatatccataaggatgtgcagcgaggaagggtctgggggccctggtagggtcaggcatgagctaggtgttgggtggggctctgatatggggagtgaccatggggacagagtgtggtaggtctgaaaaatgggaagagagcataaaatacaacaaagaatgtctgtactgagtgagacgattaagggctgagatagagtgaagggcagaggtctggttctagggcaacaagagttcgtggtgttaagtgggacctcagagatgtagccagaggaggaatggaccagtgtcttcagagaaactatgggatgcctcatagtctggaaggagtcttggggtcaccaggccagactataggtcttcacagttagaaggccaaagtcaattcatactcagtgtcaagtctaaatactcctgggtgcctttgacacccacacccatccccaaagtttgcctagtatagggacacgctcccaacatctggccaggcataagagggatgtactgcagccatcaagtgtgcacctcatatggtcactggcatgtctgagggtcctcctgtctcttgcccactttcatgcccatgtgtccccaccccacatgcatgtatcctcctcctttctgcatcttgatctcatagcacaccttggaactatcacgggagtggcttcccagtcctgcaggctgggtactagattcccagtccatagctgtttgactggacacaagacttaatgcagccattacatcttcacctgtaagatggtaggactgccgcctacctctgggataggcacaagaggggtcacatggatgccacacaggcttcccagttcctgtccacttatgaactagatccacacttccagacacccctttgaacacaggcctgatagtgctcacacagccatagccatgaacacgcacagcggtgtgagtgcatcgttcctcatcccgtgcaactgtctgtatgtgtcttgaggctcagcctcccggtggccctgctcacttgcctatgtcctcctgtcctgctgttttctagtggctgaagcagatagaggggacagaggcagccctcacgcagaagatgatggacctggagaaggagaaggtaaagattccagcgcctgcagcagaggcagaatttggctttgcagaaggctcagcattatcatagcatagcgttcagttcttaaggctcctttgagccatctcctttctcttcctttcccagtcacccagttttcatctgaacacttatttttgaccctgtgccccatcttggactcccaggccctggggtgacatgagtgcatcttgagaacattaaagatgtagtgtgacacatgggcccttgtctgagggtctatgcagatgtatatacagtggagatttttcatgatagcttggaaacctggagttggtcttccttggttgtggactgggtgctttaatgcaagcttggtggattatggttgtgaggggtgttatgctcctgggatgtcctatttggggtggaggggacagttgtcttcagctcagagaggcaagagaagctattccagaagacctggctccaaagccatccaagaccagtttgtattccaagttcaattgagaactcattgaagggctggagagatgactcaatgttaaaggctaggctcacaaccaaaaatataagagaatacattgaagaaggggactgtcacatggatccaaaccagcatgaagtgccagagagaggccctggagaggccttaggaacttgggtttctagttatccctgacatcaatggcaccatcggtgaagcactaatcctctttggccttctttttcctcacctataaaatacaggggctgcaacatgagttctggcccttgggcctcatgggtatagaatgggcatgtagtctgctcagatgaggcctgtgtagcaggaaccagacagcttcagggagtgtttaacagtgagattcatggggcagggggtgcacagcctgggcaatggatgggctgcacctgggaactattgagacaatcttcagaggctccaggccacaacacagggactggggactttgggaatatggactgaggagcaggctgcatatgatgttccttccttgttaccagatagccaagaggagggggagccagaatgatggtacccctgatcagggttctcatggatagtctgggtgcccagggcagtgagggcttttcagggagttcacacagggcagtcaacagtcaggaccttcctgctcccccagcactgagtctctagggagtaggtgcagagccttcctgctgttgacttgttccggccaatcctaatggcggcctctcttttctaggaccagttcagcaggcagaaaggctacctggagcaggagctggactacaggaaagaagccctcgaccaggcctacctggtaggaccggaagtgggtttgacactttggctttcttctctcagcctttgaggctgctgcttcctgcagggagcacaccaggttccctgtgcacccgtgcctagaatgaccagcaagtgttccaaatgagctgtgggcttttttaaaaaacacttttttatttatattcttttttggttatattcttttatcatttggactacagtttccctcccttccctcagactctccccctacctcccttctccccaagatccacacaccttctgcctccctcagaaaggaaccgacctcccgggacatcaccctaacatagcataacaagctacaataacaccatcacatcaaggccggtcaaggcaaccctgtaggaggaaaagggtcctacaaactaggcaaaagaggacagcccttgctcccactgttaggatttccactagaacatcaagctattcagccatgacatacatgcagaggacctagtgctgacctacacaggctcccagatccctgtgagcccctaagagtcccagctagttgcttctgtgggccgtgttcttgtgggtgttgctgacccctctggctcctccaatccttccccccctcctccgcaggactccccgagctctgcctaatgtttggctgtgggaccctgcatctcctcccatcagctgctggatgaaatctctctggtctctttgatgacaattctgccagttttctgtcctaccacactcttcaggcaggacaaactgtaggtcaaaggttttgtggctgggttggtgtcccaattcctccacttgagaccttgtctgattatagatgatgaaccgtgtttttcgcaaagtttatgatcttgattttttttctttacccatactaaatgagcagttgtttgagctgaatgagaaaaggcttttgtatattatatgtttgtttcttcataaatgtttatttatccttaaaattccaaagaggctggtgatgtagatttgccagtagagtgcttgcttagcatgcattatagccagttcaattcctgggcatggtggcacctacctgaaatcccagcacacgggattagaatttcactatcatcctccactatgcagtgaattccagacctgtctcaaaaaaatcccaaagcaggttttcattattattattattattattattattactaatatgaatactattatatctttttacagtccagttgttatcctcctcctggtctgccctctgactgttcctcatcccattcctcctcccccatctccaagaggatgtccccacctccatcctatcagaccttcccactccctggggcctcaagtctcttgaaggttaggtgcattttctctcactgaggctagaccaggcagtcctctgctgtttatgtgttgggggcctcatatcagctagagtatgctgcctggtttggttgttggctcagtgtctgagagatctccggggtccaggttagttgagactgctggtcttcctatggggggtcgccctcctcagcttcttccagcttttccctagttcaaccccaggggtctctgctttctgtccattggttgggtgtaagtatctgcatctgactctttcaggtgctgcaggttttcttgtagataggaacagagatgatcctaaagaacaaagaggtgaggaagtgagctgtggccagatgtgttcaagcaaatggggagaggtttaaagccctgtgaaaccctgtggggttctccaaagagtctgggtttccctcaaagtcacaaatccctcgcaccaagagccattctcccttgtgggtgagggtctaagttgtgggtgggacatttccaagatgtccccatgatggagggagagtcagtgccactctgtggaggacggtcaacactcatcactgagcaacatctctcctgtcacttttggttccttatcctgtgacgtggccgacaacagcatggggggggggatatgaatgaatgagaatgctctcatctctgtccctctacctcatccagtcttggtccttgtaaatgcccacgaagaacacacccccactgaccagagctgcctctgaagcctgtttagcagccctgaaggacagccctcagagaagcttcgggaacccagttgtccccaaggggaggtacattagatggaaagctgagggccctgatcctaaggtcctcccaggacagtgtgctaaaggacagctgcagtgctgagagaggtggggaccagcattgcaaagtgctgtggttcactggggcctctcacaggacagctatttggaaaaggtgatccccaatcataggactgtgcacaggcaggtttaggaccttgagcatgttggcttttagaacacatccttaccttaatgatcctggtccctatagaagttatagctatcactgaaacacactaaacctcaagtgcacagcatggacccagatggctatctgtcttgtgaggttctaaacagttctcgggaggcatcagattcacttagagcttggtctatggacctctcacctcctgcttccaggctggttaagggaaggtgttgggtgcatggctgtcttcctttgtcatggtgtggactgaggagtggaaactggcgtttcccacaagcttggttgctctggtacagtgacagacaggtatatcaaatggaatagagttgaagatccagaaatgaacccacacacctatggtcacttggtctttgacaagggagctaaaaccatccagtggaaaaaagatagtgttttcaacaaatggtgctggcacaactggcagttatcatgtagaagaatgcaaattgatccattcttatctccttgtacaaagctcgagtctaagtggatcaaagacctccacataaaaccagagacactgaaatttatagaggagaaagtgggtaaaagcctcgaagatatgggcacagaggaaaagttcctgaacagaacagcaacgacttgtgttttaagatcaagagttgacaaatgggacctcataaaattgaaaagcttctgtaaggcaaaggatactgtcaataagacaaaaaggccaccaacagattgggaaaggatctttagcaatcctaaatcagataggggactaatatccaatatatataaagaactcaagaagatggactccagaaaatcaaataaccccattaaaaaatgaggtacagagctaaacaaagaattttcaactgaggaatactgaagggctgagaagcacttgaaaaagtgttcaacaaccttaatcatcagggaaatgcaaatcaaacaaccctgagattccacctcacaccagtcagaatggctaagatcaaaaattcaggtgacagcagatgctggcaagggtgtggagaaagaggaacacttctccattgctggtaggattgcaagcttgtacaaccactctggaaatcagtctggtgattcctcagaaaatttgacatagtgctacctgaagatccagcaatacctctcctgggcatatacccagaagatgttccaactggtaataagggcacatgctccactgtgttcatagcagccttatttataatagccagacactggaaagaacccagatgtccctcaacagaggaatggatacaaaaaatgtggtacatttacacaatggagtactattcagctattaaaaacaatgaatttatgaaattcttgggcaaatggatgtatctggagtatatcatcctgagtgaggtaacccaatcacaaaagaagtcacttgatatgcactcactgataagtggatattagcccagaaacttagaatacccaagatacaattttcaaaacacaagaaaatcaagaagaaggaaggccaaagtatgtatacttcattcctccttagaatagggaacaaaatacccatggaaggagttacagagacaaagcttggagccaagacaaaaggatggaccatccagagactaccctacccagggatccatcccataatcagccatgaaacgcagacactattgcacataccagcaagattttgctgaaaggaccctgatatagctgtctcatgtgagactatgccagtgcctggcaaatacagaagtggatgctcacagtcatctacaggatggaacacagggtccccaatggaggagctagagaaaatacccaaggagctgaaggggtctgcaaccctataggtggaacaacaatatgaattaatcagtacccccagagcttgtgtctctagctgcatatgtagcagaagatggcctagttggccatcattgggaagaaaggccccttggtcttgcaaactttttgtttgtttgtttgcttttttgagacagggtttctctatatagccctggctgtcctggaactcactccgtagaccaggctggcctcaaactcagaaatctgcctgcctctgcctcccaaatgctgggattaaaggcatgtgccaccaccgcccagctttttttggggggtgggtgggtgggtcttgcaaactttatatgccccagtacaggggaatgccagggccaagaagtttgagtgggtgggtaggggagcagggcagacaggggagggtataggggactttcgagataacatttgaaatgtaaatgaagaaaatatctaaaaacaaaacaaaacaaaaacaaaaaaagaagctttgttgctgaatggagaggagtgagctaggatgtttgatggtgagtattgaccatcctacacgtaagctcctgtgacacttggagcccaggcagaggccacatggaatcccactgttctgccttctgttttcccatggccaaggtgactctgggagaaggtggtcgtgtctgtagccaaatcaatggtaacccaaaagggctatctaggaagtcagaacaatggtgcagatgtgagaatcgcaaaaccttccctcggttgctctgtctcatattagggtggtgtcctagttagggttttactgctgtgaacagacaccatgaccaaggcaactcttataaaaacaatatttaattggagccagcttacaggttcagaggttcagttcattatcatcaaggcaggaacatggtagcatccaggcaggcctagtgcaggagaagctgagagatctacatcttcatctgacagatgctagcagaatactggcttccaggcagccaggactagggtcttaaagcccacacccatagtgacacacctactccaataaggccacacttactccaacagggccacaccttctaatagtgccactccctgggctgaggatatacaaaccatcacaggtgggttccatcacatggttgtgatatttcttggcttggggtgagggactttgtggcagcaggagagagacagttttcccccttgcctctggacaccatggcaaggtaactgttgagcatccagcagagagtctgatgtaacttcactaagaattcaaaccctgaatggcgggactcctacagccagctccactgtctcctatagcattgcccacaaaggtccccttactatgtgcaggatcagggatggggtggtgggtaggacattctccatatttgcttccagaaaagcttccttctccacacagctggtaaataaatcatacaactgacaaatagtgccccactggcttcattagaatagagggtgagagtaagttagaagccgaagagaagataaattccagttaaatggatttgtttcagggagatgtgtttcttcttgtccttgtctcctactcagaccaaggatatttgtctctgtcaagaacagaacactcaatgaggtgtgccttggccagagagacctccacacgctctgctggaccctgcatgctgaccttccctccctagcgtgacctctagcatcacagaggcaatggctgtctgcctttctataacctcaactgtctctggtttgggccatgcagaaaatccaggacctggaggccaccttgtacaatgcactgcagcaggagccagggcggagggccagtgaggcactgagtgccagccagcgtgaggacctccaggcagcagtagagaaggtgcgcagacagctgctgcgtcagagccgggagtttgacagccagatcctgcgggagcgaatggagctgctacagcaagcccagcaggtactagcagtggcccctacagtctcattcccccactcgtactttcaatatatcctgggtccctgatgacctgctggcacttgatggacatcaggtaacccaggatgttgggtggagagtgacaggtaggagaagttctgctgacacggcatcttttcttatggctgcctgtcacagagtagaaagcattccctcgttggtggctggggagacacaaggcacttgggtgttgtaaatggtaaacttgtattctccattgactgtaacatatccacaaaacaaaggtgattctcccacctccctccaacgctccctatatggcagcctgatgtacagggaccacactgcctcagcaactcttagctgttaggtttgggatggccaagaatttgagaatcagcctaagagcctgacttgctacttcttggaggacctaaccatctgtgaggttcatacgatgctgagcagagaaaagaaggttccagaaccttgatgatagctgagggaggagaagcagaagagatgagctacacagagctttgctaggatgcatgcttcatactcatcagagcctccgcccacctcgtggcatccccgtgaggtgcgtgaatgcacacacatcatggctgtcaccagcactacctgtctctgtccttctccttccctgaagcccccaggtccttgctgcctggatgttggactctgagtgattgaggcaattcatcttcttgtcctgctgggagcctaggtgccccagctcaggcctcatctcatgagtgtacaaggtctacactggacctgagcaggtcatggacttcacaagcaaatgaagtctatccctctgtaacaagtcagaagagagagttcctctagggggactgcctgtcctctgggtcggtccttcagggattccattctggaccactataaaagacataggccaggtttttgtaacgcatgactcgatgtgtttcagaaaatccgggagatggagggcaagctggagctgcagaggcgccagctgaaggagctagaggaaaaggtaggtggaccgggagtgctaagaccagatagctgccctgttcagctttaaaacccaggcttcctgttccccagttcatccgaggaatccaaggcctccacaggcagatgctggggccacagggtcaggaatccatttcagtgtctgggtaagggttggccatttcagcgtctgggtgagggttggttcaaatcccttcagaaaggctgaaaaggtgagccatattaaaaagatgtagcccagtcatcaagatccaagtcagtgagagaccctgtcttaaaaacaagataaacaactgctgaggaatggaacggagcgttctctagttccccatccgtacccatacacatgaatacacctacctacatacacgtgtacctacatacacaaccatgcacacacagacacatatacatgtcaacacaaaataaataaataaataaataaataaataaataaataaatgatgaatgaatagattatgccttacatgcaggaaaaaataaaaatagtaagagtctggggggaatagtcaaatggtagaacacttgcttagcataaacagaaggccctgagctcaaaacattagcatacaagctgggtgtggtgggacatgctttcagtcacagaacttaggaggctgaagtaggggaatcatgagttcaaagcccccatctcaggaaaccaacctccctcgaaattaattcatatatatttatataaattagcagagtgctacccaccttcactgagatgtatacttaacacatcagtcctagtaaacaaaccctttcaataacgtagattgtatttctaatttttgtttgtctatattgtagtcccactttcaagaatacacccagtacagtgcctggcataggcagtgtgagaaagagtgaacgaatgaacgaacgaatgaacgaacgaacgaacgaatgaatgaacgaatgaatagcaatccctgaatcttagttcttttcactgggacaaaaggacatagtaataatgaagtcatgtgtatttgtagttatttttgcattaaagatcttttttgcttctttttttgacctctgtttgtgaatgtatgcatgtacgtgttttagtgaggtctatatttgtatgtatgtgtgtgtgagatgcatgtatgtatgtatgcatgtatgtatgtatgtgtgtatgtgaggtataagtatgtttgtatgtatgcgtgtgagaggtagaagtatgtatgtatgtgaggtgtaagtatgtatacagatatatatgtatatgtatgtattatgtatgcatgtgtgtgagaggtgtaagtatgtatgtatgtatgtatgtatgtatgtatgtgtgaggtatatgtatgtatgcatgcatgtatgtgaggtgtaagtatgtatgtatgtgtgtgggcacatattgagatgtatgtgttgatgagagtgcctgtgtgcacacacagaagccagaagaaggtgtctgatatccttctctaccactctccaacttttcctaggaccccttgctgaacctggagcttgagatttttccactagcctgcctccaacaggccccagcattccttctgactgccatcccatcagtgctgggataacaggcatgtgtgggatgagagacacagggcagggagcacataccatgactgaagtaagcaagaccatgctatggtgccagtccaggcctggcacttaccagctggccagatgtgacgatagcggatgtgtctaatgcatgcttggtgaagctagaaggcaaactcagcatcacagactaagcagaattcctgggaggaaacagtacacacgacaggagaggagcacacagatgcctcccaagttctcgctcactcccacgggcttcacactgtgcacaacagtagatacaccaatagctgtgcctattggcctggagagatggctcagtggcttgggcagctcaccatcacctgtaaccacagctccatgggtatctatctgacgtcctcttctggcttctatgggtattgcactattgtgcacatacacacatataccatataattaaacaataaagtctctaacaacaacaacaacaaaaacaacaattaccacttccagacccagtttaactttgggatatagtagagtgagctgttttagaccagcccttttgctaagaattgaaaaacataaaaatcaatcctctcaaggctgggcatggttgtggtgcacacctgtaatcccagtacttaggaggcaaagttgagaggtcttacaagttcaagatcagactggaacgcatccacaggagtgaaaaatggtaggccaatatccagacagggaggatcccagagacaaacacttgcactcatcccagaagagaaagccagggttatgtggatgctggtcgccaccctgtgctgctgacctagcagactgcaaagctagttgaggaccacacaggcaaggtgactgtactgtgattgtcaccacttcctgtgacaacacctgctaactgtgcgtcccttgagggcagggtgaaatttcactcatgtcttcctctgaggcaaagagtagagtggtcatagacaagtccagggagaagtcatagttgcatagcttatgtcaaagagcaaggcggtaaggtcgagcttacatctgtggggtggtgaggacatccgtgggcagaagcacaggccttctgacccagcctgattttcagggtaaggctagtgtgcctgagaagactctgtctgaatcctaaatgaggatatgggaaagcccagaaggaaagacaaaggccacttctgggctgaaacatgccaggccagcttgtgggaaaggagcttgactctctagggacagcaggaacacgttgctagaagtcactggacagcagagtttgaggctcttcatcagttgggcagacttcctggtggttgtcagatactaaatataggtgatggggagagagaaagagaaaaatgctccttgaggctccttgagggacagatgtattctccttgagacgttaaattcagacagggcaatcactagtctcgcctgtatagtttcaggcgcatctctgcctgtgtctgcagggccaaaggtccatgtctaggtagtaactaccttggttttcccatcagttcccttctggggaaccctttgagtggctgtgctagatcccagagttccctctgctaaccttctaggactgttgggaagtcctaagggaatgtcaggttgatccagctgagaatactatggctccgtggctgggttcaggatagcccgagatcctggggctgtaagtggagggtttcttactgctctgagaatgagactgtttgcctccctgggtggcagcaaggactccattagtgagggaggtgggtgggggtggggatgggggaatgaactctgcctgccattccatccataggcaccttgagagtcatagccagatgtgacaactgtacaaacgtggccacaagggctgtcacttattaagatgttaaaaatggggtggggtggggtgggggttgggaagatgcctcagtcagtaaagggcttgctttgcagacattcccggtgctggatggattcccacaattcacaccaaggacagctgggtgtggtgggacacagttagagacccagtgctagggaagtggagacaggcagtttggggactcactggtcagacagtgtggcataactggtgagttccaggtcggtgagataccccgtcacaaaaatccaaagaggacagtgcctagggaatgacatttgagcttgtcctctgccctacactcatgcatgcacacctgcaaccgtgagccaaccgacacacaacacatgcactgtacacatatagtaatatcagaaaccaggctggctgggtgggtatatgctatgctgccatggggaagcaccggttgtcacctggattgtttctctggtctctcagactttctcagagctgatttgtggatggctctgtctccatcttcccagaagggcatgcccaggccaaacacacagcaggagaggctgacctgactctggtggattactagttggctatatgacaggccttactgtcacatctaggtcctcccagtcactccgtgcaagtgatcgtgggaaacactgtggcttgtcatctttctctccttctgtggccattcttattcacaatccactggatggtcactaaaccctcctcccactgagcctcagtttccccatgtagaacatgaactattgtgggattgcagtgacctcttaagcttttgatcctagagactggatggaagaaagtggtaatgttatttggattttcacttttctctacaaacaacttaggaaactatgatcttgtttggtggggatttttttttttaaatcccagatggtggtcatatttgtttcctctagttactactgattctgtttaaacagggcaagtcacaagtagattaagaaaaaaatattcttttgaactaactgatctgtcttttctggttttgtaagggtatttttttcccagcagcgtttctctaaagacgactagcaaaaggcacatgatgttttaaatattaacaaaactctttccaggggcagtgtagggaaggatcacttgtctgcaggttggcctggctgcctcccttgttctgcccactacaacatatactggagaagcacagagtgcccttgggcaggcccttcccttctgctgccctgcgcagccttatcttcatctcccaaagtcactgcacatggcataggtctcacctggcagcagggattgatgggatacctgataaaagtatagggacaatccactgagcacataaggctggagggagcaacggcacctcctgttggcagccctccgcgcctctctctgctgccccctagtgttctagttttgtaagatgctgtcagtgaattccataccacatctcacattcttttcttttttttttcttttcttttttcttttcttcccttttcttttatttcctttccttttcttttctttttttctttttccttctttccctttctcttcttgttttcttttggtcttatgttatagtttttgttcctttttttgtttttctcactagcattcattctgtggccttgacgactcccatgcgccgccgagaactcgggtgtgtatcctttcctttctactggctgatgcagagccgattgagagaggaggttgactcccctccggctgtgctgctccttgggagatgaggagccttgagagcaaccttgttttggattctcccacttcatctcctcaggggctgtgtggccctgggtccttggggtcctgccatagaggcacatggtgaggattactgagaaagagaggccccatggcatttcatccacagagtttatgtcccattcccaaagctatctccagtctggtgtagttcctgctttgtgcaaagtgaccttcaagtgaccttccagggcaaggagcagcaggttgacaagccagtggctcatgaagccagatccctaatgtgattgcacaatgtccagaaaccaacagtctttggctcctcacctctggatctcaacctgcatgcccagttatgatgcccgactatattcagagacctgaagactgaaggcattccaggatctggccctgccttggctgttgattccttgtttccaagcacccagctttcagcctgagtccctgcctttccatactctcccagtccccttaatagggctgcccataatagggctggtatctgccaggacctctgaattttggagtcttgacccagaatctaacctaggctgaggatccttgaactccagggtacccttgaggcctactagatccctagagggaccactcaatgtccttagagatgtccctgactctaacactagctcacaagggcttaagttaggtaccttctatgtcccattgcctgggacatatccaggtacatgtttggtcatgatatagagagaatgaagggttatcccgagctctgggagacagttcacaccaagctccattgatggagtcctggggcttgggatatacaaatcctgctcccccttttttttttctgggttgtggagaaggttctctgggcaactgtcaagagagatcaggatggtgtgggcttgaagatataccaaggcactcttcttaacctttgattttttttttcacttcaaattatctcttaatcttacaggctagacaaagagcttttggaatcacctgagtccccgtggtgccccatcctcactgaaaccaaaatccaacagcaacaaagcttttcaaagtccagagcctgaacacagaatttacgcacatttgacagtcacttaaaggggaggcctggggacctggccagcctctgctgtggagctctgcaggacaatggcaagccttcccagtatccccactgtgacatcttcaggagccaagggcaaaggtggatctggatggcagaaatcgataagtgcaattagtggaagcccaggacatgggagctactaccttgggggataggcacaagccctgtccccgtgttgtgtgcctccctgaaggcaccgcgagtgcctagagggactcagacagcccctctgccccatgtacataaatctccatggactgagtgtgttcttccagagtctgtctgccagagcaaccaacgaaacctctgactccatgcacagctggactggcagctagtgaccagcaagagagagttggaatcgccaatgtggggaccctgtggattgtagatttctgaggaaagctgaaggctctgacacttataggtgtgacactgcataagtcccagagcatggctgtgcctaagtccagggagaagtgaggacagagaaaacagacccaagctatctgttgtaatttgtagggatatcctgtgaaggagctcaggctggtagtgcagcactcagaggctctgaggtctgaggtctgaggccaggagcaccctttaccataaagaaaactactgtagagccttcactgcccaggattcttggtagagagtagagtcatctcctcaggtgttggggcctcccagagcacagggggtaagataaagggtagtgcactctaagttcactgggaacaagatgctagaagtcgacttccagaggaaattccccaagaagtaactttggggaatctagggcaggtagggtggggaacctccaaaaggaacttgcctatgtggctatactctttcaaacttggggtggagagaatgttagccatcagattgacagtgtgaaaaaaaagataggacgctgagtctgggtgcaggagcgtgtggtgaggctcgatgagacacggaggcagcaggccagatgaagcctcttgctgtgtagttacaggaccaagctagtggcaccatgatttcctggaagcaagaagattgactggggctcagatcaggcccattgatggaaccatggagcagggaccggacattgtagggaagccagattcaaacacagagaggcgaggacagtgctctggacggaagaggggctgtccagacaggaggtcatcccgggagctatgacgtctccagcttgaagcaaacacagcagaatggctcagaagtgttgactctctgctgaaatctgagtcccccaacacctgtgacccataagcctctgcaacctaccactacccagtggcttaattaaatcccaaggaatttatctttgacaagcatctgagtcactgagtcgcaggagtgtgggcaactgtcaggaatatggaaagcgtgcttgctttctctgataggagatgcagggggtacgattcaactgacttctgtagacagtcatcccggggcatcccagagggtcaaggaaaagtccaccactctgtccccacaactatctgtctagaatccctgcaggctgtgctggagtgtggcccttgtaccttctgtaccttgtacctactgtgagggagagggcagcctccctgtctgcctggatctttcactcaacaccttatgtgacagtgacaccttaactctgcagtcagacccgcctgggcactcccagctcagtcatttccctgatgcagataaacagtgtccttgtgactctgaggaacacaactgacagatcccaggccatgcctcgtggaagagcttctgtgaccacagcaggatgggtggacctgcatcattccactctgacatcccgtcagctgctggcaggagcaaggatctgagaccctagtggaagggtcttcccaggagtattcatgttgctcggtcggggccagtgtccaccctcttctacccccaggaagccactcaggcctgagaattcagctcacacagacaggtgtgcaagcttcctgagtccttatggttatcttaaacatttctgccagagtccctgctgggacgcacagtctcagggctcttgccaccaaatgcctgtgtagtttccaggagagtagagctgtagagccaaggctccaaagccaaggctacactcttctgtagacaggaaggcaggtggaattttccttcgttcttcttctagactcactaggagaatgaagcccatagctcatcctatgaagtcttcaaacacaaggttccacctctgtaccccagtcctctaagcccgcgtggcatggtgatcttgagcagggcagagaagctgaggggtcaaggctactctgtcattgctgcagcctgtagcggctaagtggggaggcccgggctggagccaggtagctagatgagctgaggactgggagcctttagctttaaagtggagggtgcccctaaggctgaaattcctatttcctaccaggtcctcttcactttgcttggtcatggaaaagtgctcagtcaaggtcccctgcttagcacagtgtagagccccaaccccgcccatgtgctgtgcagaagccaggagtcttagctcagttctacacagagtccacccagcctgacaccctctcagttgcttcctatcctggctaggcagggactacatgctctggcctgcttcaggtccctaaccaaggtcatgctccctgaagaattacatggctgctgttttctttggattccctagccaggtgacctccaggaacctggcaatcccagtaccatgcaaatgggttgttcttttatttctcatgctttacctcagcttgttaagggattcccatcagggagcaggaaaccccaaaccagccactttggtgtctttttcctctaccaaattgtcaacaaaaaacaaaacaaaacaaaacaaaacaccaaacaaacaaagaaaaaaaacctcaaaccaaaacaaaccaaaaaacaaaccagcaaacaaataaacaaacacccccagacaaccaagagcctctgaggggtttctgcagaccccactatgtgtccagagccctactctggtagaaggtactagtctcaaggctgagcctgccctttcccctcctcatccattctcctcagggccaaggttttaagatgggtgctgcagtcatgacctgagttctttctgtggctatctctcagtcatgtctcctaagacattggtctctgtccttatagccactttcttgaggccggtctcccagggaaaactggtggccacaggcccagtcccctgcagcagctaagcagtaagtctggtcacaatgcagacagctgagggcgtgacccaggaaccgtcactatgcctatcacatccacccagtattcagcctgaggatgtgctgggctcaatgctcaagctgtgtgaacccactcatgtatcctctcacagacccagatgcctgtgctccagacagtgtctggacatcccttgatgagatactcagtaatttgtccagattcatacctgagacaggattcaaacccaaggaggaaggccccagcacctctgatctgagttgatcttcctgtccctttaaggccagtgtttcccatggcccattcacccctcgagtcccccagagatctactgttgggaactctgaagacctctctacaaaggtagaagagagagccacagacttcgctgttagagagcctgaagcctgagtgaggtgcatcccaggcaacccagaagtgggtaacagacaggatgcttggggtggggtacacatgatttccagacaagtcctactgccccgaagaccacagctgctgctttccaaggatgggtcaccccaagttcacccgctggtaagctgggtaaccctccggcttcattaagtgggtttatacaaagattacaataaatgtctatctttatggcaagaggcaattgtacaagaaaggctgggaaatggagagaaagtgaatgagcagctgtgtgcagaggtggaggagggggtgatacgg

SEQ ID NO: 955 - DNA, 3030 bp, Mus musculus
atgcgggagggggcggggccaatccgcgagccggcgcccggcgcccaccgatctgcagccgctagcgtgcggcgccggtccccgccgttcccgcatcgcacacgggttccccacgggccgagcctcctcggctacggtccaggcagcggcgacggcgacagcagcgtaggtgcgcgcggggagggggcggccggagaatgcggctccccgctgctgctcggcttgtgtcggagcgtcaagcaggtgggtacagactcgccagtgatggtgtgcacagaggacgagcggagccctgtacgactgcttagcacagccgagctggtagctgtactcgctggaaacatgtctaaaaagggccgcagcaagggggacaagcccgaggcggagacggactctgtgcagatggctaatgaagagctgcgcgccaagctgaccaacatccagattgagttccagcaggagaagagcaaggtggggaagctgcgggagcgtctgcaggaggccaagctggagcgcgagcaggagcagcgtcgccacaccgcctacatctcggaactcaaggccaagctgcacgaggagaagacgaaggaactgcaggcgctgcgcgaggcgctcatccggcagcacgagcaggaggcagcgcggaccgccaagatcaaggaaggtgagctgcagcggctgcaggccacgctgaatgtgctgcgcgatggcgccgcagacaaagtcaagactgcattgctggccgacgcgcgcgaggaggcgcgcaggacctttgatggcgagcgccagcggctgcagcaggagatcctggagctgaaggctgcgcgcaaacaggcggaagaggcactcagtaactgcatgcaggcagacaaggccaaagccgccgacctgcgcgctgcgtaccaggcgcaccaggatgaggtgcaccgcatcaagcgggagtgcgaacgtgacatccgcagactgatggacgagatcaaagggaaggagcgggtgatcctggccctggagaaggagcttggtgtgcaaaccgggcagacccagcggctgctgttacagaaggaggctctggatgagcagctggtccaggtcaaggaggcagaacgccaccacagcagcccaaagagggagcttcctcctggcattggtgacatggcggagcttatgggtggccaggatcaacatatggatgagcgagatgtgaggcgatttcaactgaaaattgctgaactgaattcagtgattcggaagctagaggacaggaacaccctgctggctgacgagaggaacgaactgctgaagcgctctcgggagacggaggtgcagctgaagccgctggtggagaagaacaaacgcatgaacaaaaagaacgaggagctgctgcacagcatccagaggatggaggaaaagctcaagagcctcacgagggagaacgtggagatgaaagaaaagctgtctgctcaggcctcgctaaagcgacacacgtccctgaatgacctcagtctgaccagggacgagcaggagatagagttcctgaggctgcaggtgctggaacagcagcatgtcatcgatgacctctctctggagagagaacgcctgctgcgctccaagaggcatcgagggaagagcctgaagccccccaagaagcatgttgtggagacattttttggatttgatgaggagtccgtggactctgaaacattgtccgagacgtcctacaacacggacaggacagaccggaccccagccacgccggaagaggacttagatgagaccacaaccagagaagaggctgacctgaggttctgccagctgaccagggagtaccaggctctgcagagggcttatgccctgcttcaggagcaggttggggggacactggatgctgaaagggaggcccggactcgggagcagcttcaggccgacctgctgaggtgccaggccaaaatcgaggacttagagaagctgctggttgagaagggacagatttacagactggagatggaggagaaccagctaaagagcgaaatgcaagacgccaaggaccagaacgagctgttagaattcagagtgctagaactcgaagagagagagcggaggtcgccagcctttaacctccaaatcaccaccttccccgagaacaacagcagcgccctccagctgttctgtcaccaggaaggagtaaagtggctgaagcagatagaggggacagaggcagccctcacgcagaagatgatggacctggagaaggagaaggaccagttcagcaggcagaaaggctacctggagcaggagctggactacaggaaagaagccctcgaccaggcctacctgaaaatccaggacctggaggccaccttgtacaatgcactgcagcaggagccagggcggagggccagtgaggcactgagtgccagccagcgtgaggacctccaggcagcagtagagaaggtgcgcagacagctgctgcgtcagagccgggagtttgacagccagatcctgcgggagcgaatggagctgctacagcaagcccagcagaaaatccgggagatggagggcaagctggagctgcagaggcgccagctgaaggagctagaggaaaaggtaggtggaccgggagtgctaagaccagatagctgccctgttcagctttaaaacccaggcttcctgttccccagttcatccgaggaatccaaggcctccacaggcagatgctggggccacagggtcaggaatccatttcagtgtctgggtaagggttggccatttcagcgtctgggtgagggttggttcaaatcccttcagaaaggctgaaaaggtgagccatattaaaaagatgtagcccagtcatcaagatccaagtcagtgagagaccctgtcttaaaaacaagataaacaactgctgaggaatggaacggagcgttctctagttccccatccgtacccatacacatgaatacacctacctacatacacgtgtacctacatacacaaccatgcacacacagacacatatacatgtcaacacaa

SEQ ID NO: 956 - protein, 880 aa, Mus musculus
MREGAGPIREPAPGAHRSAAASVRRRSPPFPHRTRVPHGPSLLGYGPGSGDGDSSVGREGAAGECGSPLLLGLCRSVKQVGTDSPVMVCTEDERSPVRLLSTAELVAVLAGNMSKKGRSKGDKPEAETDSVQMANEELRAKLTNIQIEFQQEKSKVGKLRERLQEAKLEREQEQRRHTAYISELKAKLHEEKTKELQALREALIRQHEQEAARTAKIKEGELQRLQATLNVLRDGAADKVKTALLADAREEARRTFDGERQRLQQEILKAARKQAEEALSNCMQADKAKAADLRAAYQAHQDEVHRIKRECERDIRRLMDEIKGKERVILALEKELGVQTGQTQRLLLQKEALDEQLVQVKEAERHHSSPKRELPPGIGDMAELMGGQDQHMDERDVRRFQLKIAELNSVIRKLEDRNTLLADERNELLKRSRETEVQLKPLVEKNKRMNKKNEELLHSIQRMEEKLKSLTRENVEMKEKLSAQASLKRHTSLNDLSLTRDEQEIEFLRLQVLEQQHVIDDLSLERERLLRSKRHRGKSLKPPKKHVVETFFGFDEESVDSETLSETSYNTDRTDRTPATPEEDLDETTTREEADLRFCQLTREYQALQRAYALLQEQVGGTLDAEREARTREQLQADLLRCQAKIEDLEKLLVEKGQIYRLEMEENQLKSEMQDAKDQNELLEFRVLELEERERRSPAFNLQITTFPENNSSALQLFCHQEGVKWLKQIEGTEAALTQKMMDLEKEKDQFSRQKGYLEQELDYRKEALDQAYLKIQDLEATLYNALQQEPGRRASEALSASQREDLQAAVEKVRRQLLRQSREFDSQILRERMELLQQAQQKIREMEGKLELQRRQLKELEEKVGGPGVLRPDSCPVQL

SEQ ID NO: 957 - DNA, 97081 bp, Homo sapiens
tttctgatcaagaaattgaggcacagagaggagacagaagtctcctgtctgaggtcacacagctagtaagtggcagagctaagaatccacccagtcactctggctcctgagcccgtgctctcgccctccacatccccctccctgacctccatatcacatgggctgggtgctgtcctcctagctttgcagctgacgaaacaacagttcaggggtatgaactgacgtctcccgcatcctagagccggcacttgcttgtgtgggacttgaattcaggtcagcagctgctccctctaacctctatttatatcacattatgttatttttcttcataaggcctctgccatgccttgaatctcagcaccatcttttaaagacaagaatcttttgtgatttcatgctaaatatgcaatgcagcgtctttgtagttcctttagaaaatgtatccaggcaaaaatcaaatcctaaaagaaggaaaaacccaagtaccctaacctctttcaaagatgtcctgtctcaatagattgtaaatatttgtctacgctattttattattattactatttgagacagggtctcactctgtcgcccaggctggagtgcagtggttcgatctcggctcactgcaacctctgcctcctaggttcaagcgaatctcctgcctcggccttctgaacagttgggattacaggctaatttttgtacttttagtagagacggggtttcactatcttgaccaggctggtcttgaacttctgacatcaagagatccgcccgcctcggcctcccaaagtgctaaggttacaggcgtgagccactgcatccggccctgtctatgctattttaaatgcctacacttaaatataagcctgcctacaaatgcacatatatacagcgtatattatatgcagtatatatacacattatatgtacgtatacactgtagtatgctgtatgtacgattgtataagttgctttttccatttaataggtggcaaacctcagagctggcagagtgatgcccacaggtcaaatctggtccacagatggcttttgtttgggctgaaacatatttaaacaaatttatgtgaattcatttctaatgtatacaaattggaaaatttcacataaaaatcaatgttagctttctccggaaaaatcagatctggttcctctgtttaatgctcttgaacatggctggagccgcgctgcgatcactggagtagatggcgtgtgccgagggctcactccagtgacttcctgcacgtttgctgtgtgctccctgctaggtccgggggcagcctgcacgtctgttgtgatggcgtacacttctctactgcatacccatcacgggatttagtcgtgcagttttgtagtacaaggaattccctatggctggacatttaggttgcttccaacttttgccctcctgatgcctggcaccgttcttcggaaggtgagagggaagttgaaggcaagagagtattggtctccaaacagtcacgttgttccgggcctgaacactgaggaccatttgacgcccttgctccttacgcagcccactgttgatagagtcataggaaaaatcctgggtcaagctatggacattgttggcaaatctggcagcacatgccagtgagaatgatgatgctgatgaagatgaagctgctgccattttttttttttttttttttgagacaaggtctggctctgttgcccaggctggagttcagtggtgcaatcttggctcactgcaacctctgcctcccagattcaagtgattctcctgcctcagcctcccaagtagctgagattataggtgcgcaccaccttgcctggctaatttttgtatttttagtagagacaggatttcaccatgttggccgggctggtcttgaactcctgatctcaggtgatccgcttgcctcggcctcccaaagtgctgggattacaggtgtgagcactgtgcccggcctgctgccattttttgagcattgctttgtgccaggaagtgtgccaagaaatgcccaaacctgaaggcacttagcctccagcagctctgtggagtggggactcggacagcctctgagtctccacttgggccataaaggacgcatggaaggagctgaagctggcctggggtgtgagcttcactctggtatttcagttctgctcaaaagagaacccagtatcatctctttcattattttgttgattgcataaacagcatggccaccatcactggattttaaacgaaactgaaaatcgtgggatgtgaactgatgagaagcacattccccatctctccaggtgctgcccggcagggctcacatgccactgttgtccgtgggcctccctccctgtctctgcctgggctgtttctgagtgggctgatgtgcctttgctcattcagccatcaataacttttgggtcctgaggttatttccagttttccactgccatcaacaattcaaatgatgctactcgcaacatctttaggcagattgctctttcctttcgggaattgcttccttagaataaatttccaggaagcatattactgcgcctggggtaggaatatggctgtagctttttaagtcagtacaatcaatttggatttagatatttaaaacaaagtcatgtacttactcagagagagatttttttcctaagggctcattaagtaatgaatgtttgttaaaaaaaaaaaaaaaagtgtggctagattctttaggataaactgttttctgtccacagaaaggatttgactctaccaacctagcccattcatattttctccacggagacccctgggatttccacgtaatttttggtgaagtttgcaggaagtgttacaaagacttcttggtgatgggctggaatttctgcttatcagatattatttggacttgagttgtcttgaaggagctacttttctttttgtgcctgtgttacttgaatcctcctataaaactatcaggccatgtggggctggaggcaggagacctgggttggaaagcccatggctgccaccgggtcatccaacaatcttgggcaactcacttctgctttctgaggcttactttttccatctgcaccttggaggcaaaggtcccttctgatctcaccttgcaggttgtgaattgtgactgtagagggatgtgagcagccctgttcagccgggaggcattgtggtttcttgatgagatcacacacagtgtggagaggggcaaggcaaggcttattcagactcgtgttctgaggagctggttgccttccggcattaaacaaagtgctgactgtgtcccaggagtggtttttttttgttgttgttgttgtttgtttgtttttgagacggagttttgctcttgttgtccaggctggagtgcaatggcgtgatctcggctcaccgcaacctccacctcccgggttcaagcgattctcctggctcagcctcccaagtagctgggattacagccatgcgcaaccacgcccagctaatttgtacatttagccgagaggggggtttcttcatgttgggtcaggctagtctcgaactcccaacctcaggtgatccacctgcctcggcctcccaaagtgctgggattacaggcgtgagccaccgcgcccggccccaggagtggtttttccctgcatgcctggtatattaatttcctgtggcctctataaagcatgaccacaaactgggtggtaaacagaaatttactctcgcagttctagaggtcagaagtcccaaatcacagtgctggcagggtcgcattcccttaaaaaaagctgtcagtccttccccgctccagctttgggtggctgtcggctgtcctgggcttccctggtgtggccgcagtgctccggtctcttccctgacttcgcttgggcttctcctctgtgtgtcttctctgtgcatctcctagaaggactcttgtcaatggatttagacttcatcctactgcaggatgatttcatcttgagatctttaacttcgttacatcttcaaagatgctttttcctaataagggtacatctgcaggttctggggagcaggatgtgatcgtatttttttgggggccacgattcagcccgcctcagccctcattggccagaagctggcccatgttggccaaccagagctctgcgcttgcctcctgtggcctcagtccagggtcccagtccttctgcttgcctctacaatgttgtcaccacgaagctgtgctttaatgaagagaggaaattttgcaggaggcctaagaaggccagacaaggccttgcacccagtgcatgggcagatattggtggtgggcatcgtggaaggctgtggggtcaggccaagagcctggcatataggtcaaggttggcgaatatccacctcctgcgaaccaatcctgttggctccagaactgaaatatctctgcagcccacccatctctgacaccacatgccccttgtcccagcctccatgtcatttgtctgtgtctcagcagcccaggtgccttttaaacagcaggatgatggtcacagagcctctgcaatgcttcctgtgtgacaggcagggacccatttcaccctcaccaccaccagtgggatacagctattacctgttgcgggaagtcagggaccccaaacggagggaccggctgaagccatggcagaagaacgtggattgtgaagattttatggacatttattacttccccaaattaatacttttgtaatttcttatgcctgtctttactgcagtctctaaacataaattgtaaagatttcatggacacttatcacttccccaatcaatacccttgtgatttcctatgcctgtctttactttaatctcttaatcctgtcagccaagaaggatgtgtatcgtctcaggaccctgtaataattgcgttaactacacaaattgtacagcatgtgtgtttgagcaatatgaaatgtgggcaccctgaaaaaagaacaggataacagcaattgttcagggaataagagagagaaccttaaactctgaccgctggtgagccaggcagaacagagccgtatttctcttctttcaaaagcaaatgggagaaatatcgctgaattccttttctcagcatggaacgtccctgagaaagagaatgcgcacctaggggtaggtctctgaactggccccccggggcgtacctgtctcttatggtcaagattgcagaggtgaaataaactccagtctcccatagcactcccaggcttattaggaagaggaaattcccgcctaataaactttggtcagaccggttgatctcaaaaccctgtctcctgataagatgttatcaatgacaatggtgcccaaaacttcattagcaattttaatttcacttcggtcctggtcctgtggtcctgtgatcttgccctgtctccacttgccttgtgatattctattaccctgttaagtacctgatgtctgtcacccacacctattcgtataccccctcccctttttgaaactccctaataaaaacttgttggtttttgtggcttgtggggcatcacggatcctaccaatgagtgatgtctcccccggacgcccagctttaaaatttctctcttttgtactctattcttttatttctcaagccagtcgacgcttagaaaaatagaaaagaacctacgtgattatcggggcaggtcccccgataattaccatctgcacttcagtgaaatggaaatccgagtcacaccctgctaatggcttcccagcatgctcagagcagggcttgaactctgtcctgggccagcttcacgggcacacgagctgtgctgtcctgcagggcctacactcagagggcctggctcttggcttaatgctctgctgttgccgtcatgcaagtcttaataattttgaacaaggagcctcacgttttcattttgcactgggctgcaaatacatagctggtcttgactctgtgcttggtgtagaacccccacgtggtctggcagtttgccctccccaccgcctgcccgtgacaggtgatatttgatagctgtgtatcacagtgccctgtagacttgttctttccagcacctaccacaagccatcattgttttatgtattcatttccatagtggtgttcctgactagaccgttctgtgatggctgggaccttgtctggtcctcctgcatgcccggtatattaatttcctgtaggcagttaaagggcaccggcactgccaaggcacagacaaacgacttggaggctgggacaggggacatgtgatgtcagagatgggtgggctgcagagatatttcagttctggggccaacaggactggtttgcgggagatgaatatttgccaaccttggcctatatgccagacaaggtccagggtcagcaggtccaaggtccccgtgccttcaggaaggagccttctctgaggactccgcctcctgtgtgtcctgagcagtcatcctccagcctgcggcgctgagccagtgctgtgctccttcctcgacagtgggctgtgccatctcctgcttggtgggcagtgggctcagaacgaaaatccccgggcgcagcagacaccaagctaagctcaggcaggagagttccctgctgttgctcctgctgacgagacctttgcgcagcccgcagccagaggggctgattacagtgatgctgtgtggtgctgtgagcgtcgggactatcaacagtgtgtccatggcacagaggccggctgctggggcccaccctgagctccgagattgacttggcccagaactttggacatcttcccctcctgcactccattcgtctccacactcactgtggcccagcctggcagtgtctggcatggggtgttgagagtaccaggcttggtatcagcccatggagatttattcaccctggaatcggatcgagcttggactttgggctgggcacggggtagggtgcacaaaggtgggagctaaggttctgaccccgaggagctgacacttgacatacagggcagggcagccctttcccccaccggcagcccaaagagttggcagacctgcagccgccccatcctgcctgcgaggccggtgggctgctcctgtggatgtggtccttttgctttctcttcagctttttagtggtgtccttcctggctaattgcagatatttttcttgcctttcttaaaaaacaaaacaaaacgaaaaaactgcactgtttcctcttaaaagcagtcattgaagtagaacattgtacttacctagaagagtctaaagaagagaatagatatcacctataattgcatcccccaggtggtccctgtcagtatcctgggggcgtggctgctatgtcctttccaccgtatccccagggtgcagggctggcaccttgcaggtgctcaacacatatttgtgactgagtgaaaataatgagcaaatatatatatagcagacaattgaaactataaattgtatttgttttttatttttatgtatttatttatttattttgagatggagtctcccaggctggggtgcaatggcacgatctcggctcactgcaacttccgcctcccaggttcaagcaattctcctgtctcagcctcctgagtaactggaattacaggtgcgcaccaccacgccctgctaattttttgtattttaagtagagaggcagtttcatcatgttggccaggctggtctcaaactcctgatctcaggtggtctgcccacctcggcctcccaaagtgctgggattacaggtgtgagccaccacacccagcctgtttttttatttcacctttttcactctttgtggtactgaccttttccccatgtggacttttctgtcggggcttagacatcatttacttaatctatcccttctggctgagccttgtgttgttgggatgaacatccaagtgtttctatcagagaccgtatctctggtatttccttaaagcacattcctagaagtggccacagaaaggaataaaaaggagcaagcttccttttttggtgttgtattttctgtgtcttcctgcccatcagggcatggggaggtgcacttcagactcgaaggctgatttctgagaactgctgtggttataaaagcggcaggtcagccgaggtgaggaatgaattatgtatcaagctctaagtcagatcaaggcgaatggagttcatacttgtctgaagacagaatgtacctttctggaatcgatcagcggtgatgttgattagcccagaataatccttcatggtgtgttaagaaacacccctctctcctgttcaggaggaaagcagctgacctccatcactgcctcccagattttgtagcttggagggatgtcccagggccccagggctagcaggtcccgcctgacttcagttcatggccaccgagcatctgcaacttgctggatgcactggtgttgtggagaccccaccccagaccatccctgggcacccctgtcctgtactttctgcatctcctgtccataggctgaggtcacatggactccaggaggccaaatccaatgtccagcttcaggtcctcaccttgacctctttggggctgcccgctgttggagtcttccttcttctagacacaccatcttctgtagcctccctggtgctttctctccttctgtcctgttcatggccttccttgccaattttgtctcatctgcccaacctcccaagttagcattccttgacactggagtgttccctcctcgctctgcattcattccctacataatctaatcccaacgccacgactcactgactgtgtggatttaggtagctgacttcacctctctgtgctttcatttcctcatctctaaaatgggcctagtaaaatcctctctcaccaggtgttccaaagatgataggacaggattcccagctcccgtcacaggccctggcacatgatgggtgcctcatgactcttctgctgtcactcactcactcattcattcacgcacctggcggatcctgatggaatgcatccttacgtgctgccctctgttctaggcatggaggacacagcaggcgcagagcaggcccaggccctgcttactgggaacccatcctcgtgtaggggacatagatgagaactaagtcaattacagtttgtcagatggaaaacgagaaggagacgtggtgaagggaagggagagcagaggcgggctttccgaggcagcttggggcggtgattaggctcagtcctggctcacccgcttccagctgtggaccttgatcaggttcatactatttcctctctcagtagttgagtgacatcaccagcagtcaacctctgtgtgtctcagtttcctcatctgtaacactgggtgatatcacctacctagtagggaaggaaaccactaacctctgaaatcgaaaagtccatttctctaagtgtggtcctcacgccctgctccagaattgctgggattgtggatggaaatgcagattccctggaccaccatgctcctcatgcttcaagctctggatgaggcccagggccctgctttttggaagaagcaccttgggagacacaggctcactgatgttggcagaccatggtctgcaggctgctgagatgggctggtctcatcctgatgggagcaggatggactgaagctattccaggtgtggtcacctgggagcctcacctaggagcatgttagaaatgcaaatcagattctctaggggtgggcccaggactccacgccttaacaacctccaagcgattctgctgcagcccccatcgggaaggctctaggtcagtctgggagtggcaggtcatgctccagatgaggcaggtgcctggcccagggtgcccgaggcagggacaccagctccccacccttctgtctctgctaactcagtttccctccttccttcaggatcccaagtgatggtggtttcctcggagggcgagctgagtcctgcgcgactggttagcacggtggagctggtagccacgcctgctggctggcgtgcgtgaacaggtgtggaccgcaggatctcagcactctgacccaaggggaagcatgtcgaagaaaggccggagcaagggcgagaagcccgagatggagacggacgcggtgcagatggccaacgaggagctgcgggccaagctgaccagcattcagatcgagttccagcaggaaaaaagcaaggtgggggttggcgtcagctcagcagcggctgggctgcaaatgtccctttgggcagtgttgcctctgaggcatgtgtgtgaagagcctgttccaggaggggggccgagggggggcacttcacctctctgccctgctgtctgtccctttgcagtacagagactgctgggcaggagtctgggccctaccagtgcttgctgtgaccttcaaaaagccactgaacacctcattctttgatttctcttacctgcaagatgggggttgtcagaagaaaaatgtttgacaaattcagtttagcagagattaactgagcaaagaacgattcgaggatggggcagtccccagaacagaacaggttcagagaaacctgcatgtggtcagacagcattcattatggggacagaaaacagaagaggtgctgaggctacttgatcagttacagcttgacccttgatccatgggtcacctgtgatttactgatgctcagctgctgtgattggctgagcttcggctatttgtttaaaaatgctcctaagtcaggcttttggttagtttgcctgctaagttaggttgcagttcatcgtataggaactcatgcatgaaggcatcctcaggctgaattcagcagggtcatggcggtaccagcttttcctaaattccaaaagggagtagggcatagtgaggtatgtcccacttccccgcttcccatcatggcctgaactagcttttcaggttaactttggaagacccttggtggagaggagggatccgttcagatggtcaggaggcttcaaagtttatttttggtttatgctgccatgaggtcttgtaagccatatatgtgctttcttagatgtgatggggctgtggtctggactcagggctctgctaggtaaagagcttggaacagagcctggttctgcgatatgagctactttcctctctcctaaggcagatttgagctttggagctggtcaggacagtgcctggttgggtgctggcagtctaattaaagcacgggctgtcacagaggggaggagcacaggctttctaggcagacccggtttcaaacctcagcttgtccgctaactggtctcatgatcttggccaggtgactaaaagtctccgaaacctctgtcttctcatctgacaccagctattatggtgtaattatagctgtccggtttaagatggtcatgaggatctgattaatggatgcaataaaaagccccatcaacatctggtgcccaggcacagctgcagtcctatttggtggcctgcttctgacttgggtgggcttgagggtagagcaagcccagggttctgtgagcccagagaggagctgccagccaggctgagcacagaaagagcatggagatgcaggcttgctcctgggtggctcgagcagttgaaggtctatctgaagccccgaaggtgccctctggctcctgctgtagtacctggagtgacgggtggaggctgcttggggaattgcagcaggcgtccctgtcttgttgagctgggactcaggtcgccaatggagtgctgggccagatccagcttccaggtggggacggggctggggcctgggatctggctgcaaccccagctcaggatggccacacagagcagaggctgagttctggaccaggggactgggcttctggaacttggggacagatgcacctgtctccatccctaggtgttcaagattccaggccgagtgcatccagcctcttttagacatggatgctggtgatgctgacctgttcaccctttagccaggtcaacaggccaggtcacctccggggctggggctggggctgactggctgggggtgtaagggctggcagcttgtatctggacatagctacagcagctgtggtgacagggaaagctgctcactcacatcacactgcctgggctcaaatcccctctccaccaccacccctgcctgaggtcttataagctgtgtaaccccctgcctcagttttcccatctgtagatggggacctctaaggtgtctgcctcctgggttgtttgaggaatgaatgagacagtcacacacagggcctgggtgctgcctgtcatacgctcacatgaccatcagggtgacctttacatgcctactgtgcagatagcaccaggtgctttagagggtgtcatgaccctggcagtgacctgagagatcaggtgtggcttcccccgtgttacaggtgagcaagccaagggctggagagggcggggacttgcccaggtgtgttagcttgccagggctgcagtaaccaagtcccacagatagggcggcttacgcaacagacgattgctgtctcacagtcctggaggctggcagccacagatccaggtgtcaggattggctccttctgaagcctctctccttggcttgcagacggccgccttctccctgtgtcttcacatggctttctcctctgtgtttgtccatgtctgtattttctgttcttacaaagacaccaggcaaatcggattagggcccaccctaatgacctcattaggatctatctccaaatggaatcacatcctgaggtcatgggggttaggacttcaacatatgattttcagggggacacagtttagccccacacacgaggccagcacagtaggtggtattgcaggattgaaagccaggcccatgcggaccccaggctgggcctccctgttaccaggctgcctccctgcctctgggacgtgtggcaatttccacttggatgcacgctggctgattattttctcaatccagccatccatgtggccgcttcaggttgactttacccatctggctgctgggagaatttcaattctctgagaattcagtaatgtgcttattgactggtacaaaaaacataaatgcaaactttacaattgcattgaagtgttactttgatatgatctcacaatcactgtcaatgtcccatttaaagtgctggcattttagcaaagcatccctgttgaacactgtaggatgaaggagggtggtaaacgtgtctgtctattcatctgcaaacccctggcatgcatgctccatgcctgggctgagtgagaagtgtttggaagtaactcagagacagaccctgtcctcaagtcgcatgggtacagagcctcacaggaaaccagcaatacagcagccctgggcacattccatcagaggttttagaaaatagtgcagggacaagcagaacccaaggcttcacaggggcagttttgtgggggttttgtggagcatttccttactttctggcattataagatgccccaggctccgcagtggctcatgcctgtaatctcagcactttgggaggccaaggcgggcggataatgaggtcaggagatcgagaccatcctggctaacacagtgaaactccgtctctactaaaaatataaaaaaattagccgggcgcagtggcgggtgcctgtagtcccagctactctggaagctgaggcaggagaatggcgtgaacctggaaggcagagcctgcagtgagccaagatcgtgccactgcactccagcctgggggacagagcgagactccgactcaaaaaaaaaaaaaaaaaaaaaaaaaaggtgccccaggcacatcttgtatatttcctaccccagcgctagacccagcagtttctctaaggggtcctggttccttttattggagaatggcattagaaacaaagatccaggcaccaggcgtgcccatcactgctgcggtgtcattgtttctaggccctctcagctgccagaacaaggaatatatatgtgtatactgacctgcgtatgtacgcatacctgtaaatatttccatatatgacatctatatccatacaaagtcaaacatgagttcttacagatgtcccaagacgcatccactgccgcatggctcccttcagcctcctcttgcttgtctgtaacctcttactccaagtgggaaacctggcttccccctctgccatccactttctttgttcaacactatacatgtatgatggtttcagagtagtgaactggtacccatgagatttagagggctttgagcatggagggtgtggcggggagggctgctgcaggtggcttgggcaagggggaagtggggaagtggccaggcctggacatggagagccagtgctgctggattggatgaggatgaggatggaaaggggtgaatctgactcactctctgagtgggagtggcaagtgagggtggtgctggtggttcagataatttctccacgccagcccccacacccccagggcatgctccctctcttggcctttgtgccgtggctgcatttagagtccaagtgctgaggagcggctggtgtaggtgcctctacacttggggtagcttggaggcacctggaggtaaagtgctgggcggctttttttggcctgctcagctggatggagtggtggtgggagggagtgctctgtgcccatcagaggtcaccccagcctcactctgctgcttctgtggcataggtcatgtcacctgggcttggctctcagcagctttgggcagagctggagggacccagcagggccctgtccccaggcccctgcctctctgtcaccatccctgccctacacacctggatcaccagcctcagcagcacctctgcccctcccaggaagcagcccctagacgccccgggctgccctgcacaggcctctgcccacccttccatgttcctcaccccctttctacctgtgtctctcacacgaggctgcccacccctgatgcagaaagtcagaaccacgataacaacagacttccattcacccacccacagtcacctcatcttcctcctctcaacgggcctttgaggggcagctgttgccatccctgtttcctagtagaggaaactggagctctggaaggttgtgtagtcagggttcttcaaagaaacagaaccaataggttgtgacacacacacacacaccccccacagagtgagaggttgttcgttagttttaaggaatcggcttatgcggttgtggggctggcaaatctgaaatgtgtagggcagaccagcaggctggagattcaggcaagggttgatcttgcagcttcgagtcccagtgcagccgggaggcagagttccttcttccgcaggggacctcggtcttctcttaaagccttcgactgattggatgaggcccacctacattgtggaaggcaccgtgcttcacccagagtctactgatgtaaatgttaatctcttataaaatgtaccttcacagccacatctggactggtgtttgaccaaacgactgggcattgtggcccagccaagtcgacccacaacatcagccaccatagaggcagagaaatttgcctggggaaacgcagctcatcaaagcagattaggatctcattggatctgaccctgctggccccagatggctgtcggcattaaccagggacttgactgttgcctcgcaggagggagaacagtcaaaaccattttgtccataactgggacaattctgttaaatacttaaagttctggcttcctgctgctaaatccactaggaaaagatgctgattgctgcccccagggtaaggtggacagaacatggactggtcgcctggcttcattcctatgattgtgagtatctggtgaaaggagatgttgatcttgtgtgtttgcctgggttggttttatttgcttttttacctgctgttttaagtaaggatttatcaatactcaggtgccattgtaaaacttctcacctaaaattaattttaacatgtgactatgctatcaacagtgtggtctggggaaaaacattgccattttccctggaagcagcttgtccaccagaggcaattcatttcaggtcttcagagacgggcagaattcaggaaataagggcttgtcaggcgttcctgtggaatgtgtgttgagtgatatttgaaacaaaaaggttaaagaaagcattttgaagtgttttaagaacacactcccttgggacgttttataagtaatgttttgaattgtttgctgataaaatgaataggctcaaggcggggtgggttgcctggtagcacagggtcctcatccctcaccctgggcagctcaccagactgtctctgatctttggctgcctcatgataaaacagaggagagagagaggaagagagagagagagagaggagagagggagaaagagagggagcacgctacttccttcccaagaccgtgaggggttcatgtggcaatgtgggtgatgcattggagcccccagcccagctagggaccccactcaacaagaatggtgccccctgctcactgccccccaggacttagaagcctggtctgtcttttccaactccacagtccgcgcatggggccctggaaatatatttctggtttacaatcttttgggtcttggtgatgatttctgcagggtgtgttttgtgattgagcagtcgtctcaatttacaacctggaagagatgtcaaaggcttgaatgcctctccagcatcctcagggggtttccacccccagggaaagtctcagggaactagcaggagagattctaagtggggctggcaggagggtcaggcctgcagggcactgccgaagggggaatccatgggaacgtgggcccaggtgggtgtcttgggcgtggggaggctgtggccagctcccccagctgtgaccctgaccctgaccctgaccctgaccctgaccctgaccggctctctcgccgctctggctgcaggtgggcaaactgcgcgagcggctgcaggaggcgaagctggagcgcgagcaggagcagcgacggcacacggcctacatttcggagctcaaggccaagctgcatgaggagaagaccaaggagctgcaggcgctgcgcgaggggctcatccggcagcacgagcaggaggcggcgcgcaccgccaagatcaaggagggcgagctgcagcggctgcaggccacgctgaacgtgctgcgcgacggcgcggccgacaaggtcaagacggcgctgctgaccgaggcgcgcgaggaggcgcgcagggccttcgatggagagcgcctgcggctgcagcaggagatcctggagctcaaggcagcgcgcaagcaggcagaggaggcgctcagtaactgcatgcaggctgacaagaccaaggcagccgacctgcgtgccgcctaccaggcgcaccaagacgaggtgcaccgcatcaagcgcgagtgcgagcgcgacatccgcaggctggtacgtgccgccccctcccccgcccgcgggcacgcggccttccctccctgcacgcatgggggaaatgcggagctccgaggacctgctgtgctccaggcattgttcaaagcactggggccccagcaacctccctcccgtcttaggtgtggtaaggaggctttggggctgcaggtaatccgctcaaagaacagttccccatttgtcaaaggagcttaatggagactagcgagggttgttgcaaatgcctcgtgatagcatatctaagtgtcgggcatttattgattcatttacttcaacaaccatgagcagacttccatctccaggtaagatgccacaggtcagggcaggccggccaactggctgcaacagcaagggaaaaatataaattgcaaatagtcctgttttgaaagatactggagatctgtggaagctgtggagtgtggatgaactaaaattccaaagggaaggggaaagagccctgcctgggcggcctaattgccagctgctttcttcccttggggcatttgtggattctgggtgcgggctgaggattggatgtcctcagagagatgagtaggacttttctgccatctcagagtgggcatgaaacaatggaaaccagaggagccccacctaggccagcttgctgcacaggagatcctcctgagtcctggagtgaagggggaggctggcgagcccagctggaaaggcagaatgacagctcccatgccctcactggacgtaggagacaaagggagggggcccgccacaaacacatgaccagtctgcccctcagggcgtttgtcacactttgaagctgtgtggggcaggaggctaagaagtaaagtaagctgagattttcagactggatcaaagagtaacagtgatatttacaagagagacatcttaattatgaggacatggtgacatggagcataagaggatggggaaagatacactgtgcaagcacttcctaaaagcaaagctggtctggctgtattaatgtcaaaggctctaaggcaagaagtaatactaaagacacaaaaggacagttcttaataataaagggtcaattcagtgggaatgcattcaataacaaaacctcaaaatgtataaaagaaaaaaattatcaacactaaaaggagaagcagacaaatccacagttatggctggggacgaacacgcttctctcagcaaacagtagaacacacagacaaagaatgaataaagacatgatttcaccaacacaattaaccaacgtgaacttacctgacagagcactctattccacaactgcagaatactgtggacatgacatacttttatcattgtagaccacatttcaaaatttgtgggttgtaattagtccttagagcaaaacatattttagacaaaaagaagaaatgctgaaaatcaagcatctaaacttctctctcaagaagaaagaaaaagaacagcaaattaaactccagagagtagaaggaaggaaattttaaagagcaagaagcagtgaaataaaatcaataaagaaaatcaacaaattcaagagttaattaaaactgataaattgacaaacatttagcaatattgataaagcaaaacagagacaataaattactaatatcaaaaatgtaaagggggaaataccacagctcctacagtcaataaaaccacagcaaacagcatataccaataaacttgaaacctcgataaaatgaacatattccttgaataagcacaatgtaccaaaactgacatgaaacaaatagaaaatctaagtagtcctaaagctcctaaataaattaaatctgtaatgaataattttcctatgaagaaaggcccagacctagatggcttcacaagtaaattctttcaagtgtttaagaaagaagtaaaactaattctagccaaagtcttccagaaaatagagaattaggaacacattttaactaacttatgaagccagtgtaactctgattccaaaagcaataacattacaggataagaaaacttttggattaccttttatgaacatagatacaagagtacgagcaagatattaacatatcaaatccagcaatacataggaaggctaataagtcataacccagctgggtttattctgaaaatataaagattggcttcatattctaaaatcactgaatataattcaacataataatatgataaaaaagaaaaacgtggtcagtcatcttaatagatgcagaaaaatctgttggtaaaattcaacttcatgatataaactctccgaaaaccaggaaaagaatggaatttctctaatatgataaatggttctatcaaaaatcttttacaagtaacatacataatgatgaaatattgaacatttcccacccaagttcaaggtcaaaacaagatgttgactattaccacttctagtcaacattgcattggccaggatgtcaaatataaaataaaataaaataaataaaagtttcattgggaggccgaggcaggcagatcacgagtttaggagattgagaccatcctggctaacacagtgaaaccccatctctactaaaaatacaaaaaatcagcggggtgcagtggtgggcgcctgtagtcccagctactcaggaggctgaggcaggagaatggtgtgaacctgggaggtggagcttgcagtgagctgagatcgcgccactgcactccagcctgggcgacagagtgagactccctctcaaaaaaaaaaaaaaaaaaaaaaaaaaaagtctttagagagggagaaaaaagggaaactcattatttgcaggtgctatggttgtgatgtagcaaacccaagacacctgttttagttcattactgttgctataacaaaataacacagactgggtaacttatatataatagaaatttttttcttaccattctggaggctgggaagtccaagatctaggcactatctggcaagggtccagtttctgcttctaagacagtgccttgaatgccatgtcctcacatggcagaaggagtggaatgacaaaagagaggcaggcagctcatatttctcttataaggtcactaactcccttcataaaggctttgccctcatgacttcatcacctcttaaagaccccatctcctaatactatcacactgatgataagtttcaatgtatgaatttttgtgagacacattcagaacatggcaagaccctacaaactattagaattaataagtgagtttatcaaagtctacatatacaaggtacatacacacaaataagttgtttcaatatatcagcagtgaacaattagaaaatgaaatcttaaaaaatatcatttacagtagagcaccacaaaattcaaatacctaggaataaatctaaggaaagttgtgtaagatgtctcccctgaaaactataaaacattgctgagaaaaacttaaggagatctaaatcaatggaaagggatatcgttttcatcgattagaagacttagtatagatatcagtttttccatgattgatctacagattcagtgctatcccttaccaaaatcccagcagactctttttttttttttttttaactgagtcttgctctgttgctcaggctggagtgcagtggcgtgatctcaactcactgcaacttctgcctcctgggttcaagcaattctcctgcctcagcctcccgagtagctgggattacagatgcctgccaccatgcccggctaatttttttttttttttttttttgtatttttagtagagatggggttttgccatgttggccaggttggtctcgaactcctgatctcaagtgatccacctgccttggcctcccaaagtgctaggattacagacgtgagtcaccacgcccagccaccagcagactttttaaatgcagacatcggcaagcagattctaaatttgatgtaaaaattgaaaggatgtggaatcacaatcttgaagaagagaaaaattggaggtttcatacaacctataacaaagtttactacaaagctacagtaatcaagacagtaggctgaaggttagagagacacgtcaatggaacagaagagcccagaagtacatcttcacgtgtgtggacaaagataccgtggcagttcactatagagaggatgatctttcaatggacaatattggactggtcagctatctgtaagaaaaaaaaacaggaaatacacacacacacacaccacacacactctctgtatatagagtatgaagtctatatcatactacccacaaagattaattcaaagtggtccataggcctacatgtaaaaagtaaaacaatatagctactagtagaaaacagactattttcatgatcttgggacatggtaaatatttcttaagcaggacacagtacactatttacataaatatactattcagagagggttgtacattggacatgaaataatcattgttcatcaaaagacactaataaaagagagacaaggcaaattacagactgagagaagacatgttcaatacctataaccacaaagaacttttgtgcagattataaaaactataaaataatatgaaaactcaaaaatgggcaaaagcttgaaagaatatttcaaaaacaggataattaaatgactaacaaatatgtgaaaaggtgttctacctcattgatcatcagggaaccagagtaaaattacaactagatataaattctcatccactagaatgactattaaaaaaaaacagacaatagtaaatgttgactagcatgtggaggaatgggtaccgtcattctgataggactttaaaatggtatagccaccttgataaatggttttgtagtttcttaaaaagtctaaaaaaaggacacctacggactctgtaattctactcctaagtatctacccaagagaaatgaaaacacatatctatataaagatttgtacatgaatgcttatagcattataatagtcaacgaatgggagaagcccaaatgtcctcagttggtgaatggataaatgtggcatgtctatataacacaatgtgattcaacaatgagaaggtatgaaatattgatatatgcttcaatatctataacatttctgaacctcagaaacattatgctaaatgatagaagctagacacaaaagacctcatattgtatgcttgcatttgtatgaaatctccagaatagccaaatctatatatccaaatctatagtggctgacggggactagttggaatggagattagctgtaaatgagtgtgagggaccttactgggcgaggaaggttctgaaacagattataatgatggctccacaacttggaagacttactaaaaatcggcgaagttcatgatttataaattaaactctaaaatgtttaaaacaagaaaaattggaaatttaaataggattgataaaagtttaatggtggatcttgtatttgcatttaaaaggagcatatttataagaggaagaacagcacacaatgaaacaacactgcccaggcaccaggatggctaaattaaaaagctaacagtgctgagaaatggcaaggacgtggagcagccgtgcccctcggtagcatcccatacactaaagtgccctaaaacgaaacagagacatctgttaactcagaatttctcatcaagcaaaaaatattattttacaataagagtgaaataaagacattttaggtaaaaggaagctaagattatttgtcgccagaggctgtaccaccaaaaatgctaaaggaggttctgcaggtgaagagaaacaatgccagataggaatttagttctcttggaagggaataaagaacaggagaagtgggtaaaggagagtcaatgtctgagacgatctctttttctcagtgtattcaaaacacaagtgactgtttaaagcaaaagaatcagattgtattgtggggtttatgacatatgcagacgtaaaatgcataaaacaatctagaaaggatggggtgggggtggttggtggaaaatggatctgtgctctcgcacagtccttcagtcttgtctgagggggtgcgtgacgctatgagttcaaggaggctgtgacaaatcaaggtttaaaaaggcagcacaaggaggcacagataaaaagcaaatggggaaataaaatgagagactaaagaaatctgtttgcactaaaagagggtagcaaagaaggaccaaagcaggggaaaaaaacagacgagacaaatggagaagagacagcaaaacggtggaattaaaggagtcatatcagtagttacattaaatgtaaatggactaaaccagttaaaaggcagaaattgtcagagtggatacaaaagtcacactttaaatataaagacccactttccctgaaggaaaaggatagaaaacatgctctgtgagcaataaatgtagcaataggatggataaaggtgtatttagtcaatgggatattacacagcactgggaaaaaatgaatttccaaaacaggcaagaaaatgaatgaatttcccagccgtggtgtcagaaccaaaccaaagaagatgagcacaaaagctacatactatatgattttactcacatgaagtttaagaagcgtaaaaactaatctaaggtgctagaataagagtgtggatgacctccgggtgtggggttgatcaggaagcggcaggagccagccttctcgagcatcaggaatcaatctttctttctttctttcttttctttctctttctttccttccttccttccttctctttctttctttttctttctttctttctttctttctctctctttcttcctttcctttcctttctttcttttctttctttctttttctttcttttcttcctttctttcttcctttccttctttctttctttctctttctttctttctttctttctttctttctttctttctttttctttctctctctctctctctttcttccttccttcctttcctttcttttctttctcttttctttctttccttccctcctgcccttcctccctccctcccttccttgttccttcagatgaagtttcactcttgttgctcaggctgaagtgcaatgctgtgatctcggcttactgcaacctccacctcctggattcaagcaattctcctgcctcagcctcccgagtagctgggattacaggcgcctgccactacgcctggctaattcttttgtatttttagtagagacagggcttcgccatgttggccaggctggtctcgaactcctgacctcaggtgatccacctgtcttggcatcccgaagtgctgggattacaggcgtgagccaccgcacgcgacgaggaatgtttcttttctgacctgggtggtagttgtgtaaagtgtgctcaggcaggcgtggttttggacagcaccttgttaaaccagactcatgcgtatcagaaccatgttctcgaactccaaactcgacactacacttttgttatctctgattcaagtcacagttaccgctaatctgtcccacaatgtaagtgagccataaagggcattgcattttaattattctttccggttccacggagagagctttcactacctctgaaatattcaaagccagacaaaaacctgacatcctggtcttgggtgcttttgatcaagggaaccagattgcgtttctccaagctgcctaaggaagcgtgggcctggcttttcccatggaatggttgactcacaccatttgtcaaatgatgatgagaatgaacgcttcttattgcattttttgttgcaaaatggggaagtgatctgtaaagcttcccccatccttatggagttttccaaaggtggtatagaaataggttgagcatccctaatccaaagtcccaaatgctccaaaatctgaaactctgtgagtgccaacatgaagtcacaagtggaaaattgcacacccaacctcctgtgacagatcgcagtcaaaatgcaggtgtacaacgcagtgtatttagcatacccaaggggaaaaaagatccccctagcccccatcagctgtgatagagcttccatacacacccagactccccatgcaagcaagctcacatgttaccatgagcacattatcttctccactgtatcagtggtatgtgtgaataagtgtaagaagtgattacttattggtagcatataaattcagagtcagaacggggcgagatggctcatgactgtaatcccaatacatcaggaggctgaggtgggaggattgcttgaggctgagagtttgagaccatcctgggcagtgaggtcttgcctctacaaaaaatttaaaaattagccggacatggtggcatacccctgtagtcccagctactcaggaggcccaggtgggaggattgcttgaagccagcagattgaggctactgtgacctacgatcatgcccctgcactccagcctgggtgacagagagagagtctgtcttgaataaataaatacattcattgtcaggaatgatggtgatgccaaacaaccccagactgtcaacttgggtggctgagacagtgagaactttgccttccgatgtttcaatgtacacagacttttgtttcatgtacaaaattattaaaaatattgtataaaattacctttcagctatatgtataagtgtatgtgaaacataaatggatttcatgtttagacttgggtcccatccccaagatatctcactatgtatgtgcaaatattccaaaatccaaaaaccctcaaatctgtaacacttctggtcccaaacatttcagataagggatactcaacccgtactcccattttacagggtaaaagttaagtgggaattttatactcagcctcaggccatggatcctctttcaaaactcaattctgaatgatacaggattaaaagcaatgtccaatgggatctgaaaatgaatttgttataatgataatgacaaatattattttacccccagtttcctcaacagagtatttgatgcacagatggcatgcaggcctttagaaaaatggagagtgaagatatagcctgggaaacagtctttaaacaatgtggcagagggttaacatcctcagtgtataaaaagtttgtcaagtttacaagaggaacaatgggaatttataattagtcaaggcatgggaacacacagttcacaaagaaaagcaatgcctattaaatataaaaattagtttaacctcaccggtcatgaaatgcaaattaaaacagcaggatgctatcatacccaatcaaattagccaggatttttttttaaaggtagggtgtaatttaagtgtcaaaagagaagacagcaggtgcctttggcaggttgttctcagccccagggcccttgcacaggcactcctgtgtccttggccgggagcgctccagccccgatctttgcaccgctggttctttctcactgagtagctcccacctcagtgtcccttgttcagggaggcctgcctgagcatcatctaggccagccccgagtcactcagttatatgccaccttttcccatccttgccacagcacttctcatctgatatttttctctctctctctttgattatttcttgtgtgttttcccctactaggatccaagttctgtaaggacagggactgagtctgtcttgttcactgtgaaagcccagagcctgtgcagtgtggtgcatagcagacgccccccgcctctgtgcaaacaacagctttatgcacgctcctgccctttagtgtgctaattccacttccaggagtctaccgaaggaaatgtgcaaaagcatgcacaaatcttacgtacacatcagatggcaccgtgtgtgttctgccagtggtctgttgcatccgcgtttgctgcctcgagtttctgagtcaggacaatgactcaggcatttatgacaagctatagggacttgggaaagtgaacacagaaggttaaaaaacaggatgtatggctgcaaacaggactctgtcttgcagaagtagaatgaggggaagcaggtgacaggttggcaggggctgcctctggatcctgacatcatgggggctttctgtttccttctctgttctttgttgtatttttaattttccttccttcctttcttctttctttcctttcttcctcccttcctttctttctttcgctgtctctctctttccccttcctttcttccctctctccctccctccctcccttccttcctttcttcctttccttccctttttccttcgctcctttcctttcttttctttccttctttcttctatttccctcctcccttcctttcttcttcctttccttcccttcttccttcctttgctcctttctttttctttcatttccctctttcttttctttcccttcctctctctccccttcctccctcccccactcccccttccttccactttccttctttccttccttcctccctccctctgtcccttccctccctcttcctttttatctttcttctatcttttttcttttttgacagggtcttgctctgtcgcccaggctggagtgcagtggtgcaatcacagctcactgcagcctctaccttccaggctcaagcaatcctcccacctcagcctcctgaatagccaggaccacctatgcccagctaatttttttgtattttttgcagagacaaggtttctccatgttgcccaggctggtcttgaactcctgagctaaagcaaatgtcctgcctctgcctcccaaagtgctgggattataggcgtgagccactgcgtctggctgtatttttcattttctataatggatctgcattcctttcctaataagagttaaaactttatttttgaaagagtgccactgttgggaactagtttgacaaggtaggaggaatcaaggcacagcttaaggccttgggcctcaggatctcaactaggagaacaggggccgatggaccagcctaggctgggtgcccgcagttcctgagaccccaggggccccggaggttggtaggtttgtttactcccatgcctgtctgccaagccctctcactggggccaggctgttttcttagcacgattcctcctgtcagttgggtaggagtggcccatttctggccttctcagtggccctttcgcatcaagcttcaggcagctgggagataaaggagagtgttttctttctttttttgccagaaaattacggaagagaggctatatattttccgggcactccatttggtgagcacctgctgtgagctagacccagggctagcacagattgtttgagattttattttatgcttttataaaaccataatggttgtttttaaaactcatgaactgacagtggcatgtgttcgatgcatgttccctatatagatgcctgctgggccagcctctcgggggagtcctggggggccatggctaaaaccctgcctggccatctgcagggagctcgcagtctactggggtgacaggtgacacccgctcccatgtgatctctgcttgggaggtgaagggcaggacatctggggactgcccagccgagccagggtggcagaaaagagggaacttgcagcctcctgggcaggtgggactctggagccctgcacacaggttgaccagacacattgagtggtggtgggcagaggcactgggccaggacttgttccccaccgactcctaccacgggcaaacctggctccttctttgaggaaagtgacctcttcccaagtaagcatcattcctctctggagacaggatacttttcagggcacggcagccacacctccctgtacaggtggacatcattcattgtaatacaggaggtgtctggttcaggaccctgaacttcaagagactgctgacctttatgaggtgactgttttgcataagaatttgagtgattgtttctgaagctgtctttttgggacatctcgttgggttggttatcagccttggaagcagcacatgatctggactcgctgctaattgctgcatgttaatagtaaacaatcagtttaatgggagctggacactgtttatagtcatccatggccatgaaatttgctgtcagtcagaatggcccaagaacacatatagccctgggcaggagagctccccctcagttgaatatttatttactgagttatagagaaaaataagacacgattccaggcagcaaagcgcttacagttaactggagtgtgagcagattattctagtgtgagcaggacggtttggtaataggaccatgcaagccaaagaggcagcaacaaagaagaggatgtgatcacttctgtgggtagatgcaggagtcatttcacagaggaagtgaggtgtgagctgggttttgaaggatgcataggagtttgttaggtgatcctatgcagagggagaaacactggcaaaggtttggaagtaatggggcatgatgtgatcattttaaccatatctctaaaatagccatgatgatatgtgatacttggattcccagtaaaatacaaaatgaaaatataatggaatcctgttgtcaagtactggagactttattttcttacttttaataggagttctaaaagtgtgaactatttctggcaaaaggtatagatgagatcacaagcaaacaccttgtgcccaccacacagtagatgaagcatcacaggtagaatcgaggcccctgcacctgaatctgggggaatgatttccaggaatgcgtttctgtttctatctcccatgcatgtgatgatgaccgatatagtgggtctgcatgaacactgaaaaggttttctattctctgccttccaatgacttggggtcaaggaccctcttagaaggggccatgcttccctgcagacctcactatgctgtgcactgagagcttcagtgacagaataacgacgaagggtattttgcttatattctatcttttcctcctatagactttcatagctgggcagaaccaacaatgttctctcaatggcttaaaacccacctctgccaagccccgtgcattcccagaggagcaggaagggggtgtggccatggggaggggagcctgcggctgcaggtgggtggtgctccagtttcctctgggcatcggtacacaagcccattggcaggaaatggttcttcgcccagtgtctcattttgtagcacaggaaggagatctagggaaagtgaatgacttcagagagctgaagtgcctgtacccacactggccccctctcactgacagtacagggctcctctgcatgcaggctgtgggctggccgggattccaccacacctggagtgtgctcttcaggtgaggacggctgggagggagggggcgggacacccagtgaaaggcactgagggtgttgctggggtagaagggagttctctcttttcttttccttaccttttaaaaagtcctgatgatttgatgatatattcatttattccgcaccctcaatgttggaaagactctgagattccaaaggttcttagaaactaagaacctcctggagaggtagtgagtgtcccagcatggggagagtgtaaactggggctgggggccctctgcgggagatgagatgctggaagagattttgggactggaggcaggtgacaaggcacccttttaaagtcctcatccagctatagcctgggtcccacagttggtgacaaaccaccagttcatgccttaaccccatactgtgccaagaatggcagaagagctgtgtgtcagtttaaaatttctgatttatagacagtgcaagcacaccaatactgagtcctcaggaacagtctccagccccttttctctatcacgtatgttcatgggtttgtgttcaggggagctgtcatcacatggtgggaagagaagcctttggagagaggctgccctgagtgattctgggctccccatttgtttgccatgtgaccctgggacaggtggttactgtctccaagcctctagcacctcacctataaaatgggggtattcccatatctgccgagagttagaattaaacaagcaagtgagctaaagcatgtagcagcttatagtttctgtaataggatacttgtaaaatgtgttcttctgttataggaaaaatgtatatgtaagagaagtaaaatgggggaagaaaaactctgtgtatttgcacaagagacggtttgagcttaatttaaaatgtgccagggatccagtatcacaaaggctccgtttccatttcagtgccaaacaaaaatctcccccattcaggtatctcattgtgtggatggttttcacccaaaatggtccacttaggagaaggagtgaaaaaatcaaacgttcatttctcctattcacccacaccctgtctgataaatgtcactccttaagcaaacctgttgcccatggcaacacattcagaagatgggctgctggtttcatttctttgtcagctggattggattagaaatgcaagaaggcttttggacttgtgtctacacattaggatgcatcttagtaaaagtcaagaagaaaaggtggttatggtcaacctggggtggcgatgctctagtttaaggcagtcatggtcaacgtggggttttgacactctaaggacgtcatggtcaacgtggggttttgacactctaagggcgtcatggtcaacatgggacagtgatgttctagtttaaggtggttatggtcaacatggggagtgacactctagtttaaggtggttatggtcaacctggggcggcgatgctctagtttaaggcagtcacggtcaacatggcgttttgacattctaaggcggtcatggtcaacgtggggcagtgacgctctagtttaaggtggttacggtcaacatgaggcggtgacactctagtttaaggtgatcatggtcaacatgggacagtgatgttctagtttaaagtgatcctggagcccatactgcgtggcctgtggcttctgagaaaccctggtgtggtgctctgttagtttcctgggggcagctgtaacaaattaccacaaacttggaggcttacaacaatgacatttattttctctacggttctggagtccagaagtcccaaatcaagatatcagctgggccatgctcccttggaaagctctagggtgaaagtgttttctggcctcttgcagcttctggtgtggccggcagtcctcggcatttcttgacttgcagtcgcaccacttcagtctctgcctgcacgtggccttctcccctgcatgtctgcagcttgtcctcttctttttcttctttttttttttgaaatggactctcactctgtcacccaggctggagtgcagtggcgtgacctcggctcactgcaacctctgcctgccaggttcaagcaattctcctgcctcagcctccctaatagctgggattacaggcatgcaccacctcacctggctaatttttgtatttttaggagagacagagtttcaccatgttggccaggttggtctcagactcctgaccccaggtgattcgcctgcctcggcctcccaaagtgctgggattacaggtgtcctcttcttttaaggatgccagtcagtgggtttagggtccaccctaacgtggtataacctcatcttaatttgcatcttcatttcatctgcaaaggccctatttcgaagtaaggtgacattctgattttcggggtagatgtgacattttgggggacattattcatcccactacaggtaccaagaatgagaattgatgttgaggtagtggcctctgcttcagtctttgattcccccaaactttgcaataaagtggagctcaccaaatcagtcatgggtcagtgggcttgttttcactaagatacatttcctggtggacttgactgcttagaaacaaccggactctgttcctttggggcagaggggacagggaggacttggagaggacaatctgcacttgagtcatggttctgctgctaactagagtgttagcacattcccctttctgggcctcaagtttgtgtgtaacttggggtaaatgatgtccactttgaggatcttttaaagactcagagagtgtctcttaagtacaaatgagtacctagctcacgctagcattaagagaggagtgatagccaacatcaagtttgtcgttcttccctgaactctgttgattgtgattcttttggtcgcaagtgacagaaattccatcaaaccagcttaggccatgggtgtctgttggctcccccaactgaagtcatgggatttgctgtaggtgcagctccaggtgcactaacgatgtcatccaggatcccaggttcttgggctctgctctgcctcctgctgtgtcattcccaggctgtgggctctcatgctgtgctggggggatgccaccactgtgccaggtcccacattctcacaccacacagcccagagtccctttcttagctcctaaagaaaaacaggaggatcctggtgctgcctacttctggccattggttctgattggattgtgcatccatccctgaagcaattactgttgggacagggacatttgggtggcatgagccaattggggactgccctgggaacttgcagtgatgttcgttccacccctttcctactgcacatgctgagactgggcgtatgggagaaggggaaatggatgcgggaaggaagctgagggatgttccatatggtcaggtgagcagttccaggaagcttgagatttcatcagcatcccaagggcagcgagataggatcactaagagctcagcttgtgatccaggagtaaagtcagtgaactgtgagtgtgcctgcctcttgctacgtgagcgtggccagtgtcttaacctctggggcctcaggactctcatgctggctccggaatgtgttctgcattggccctccgtccgtttctagatgccatctctgctgtttgagaatattttctaggaaactttcttgtgatgactggggcagaagccctctgtctcacttactaggacaagggggaattggtgctcttccaggtggagaatttgggatcctggagatgtcttgctcgcgacggtgctgtcttttgtggggagctagtggaaggcagtggcgggggcttcactgcaaagctgatactgaggggcagacaagaaccctcccttacccgtgatggacaaactgttggtttgcaacaccctccactgcctctaccgatttcctttgctttgatgttgttattgttttttttccccctcatagcacaaatcactctcaatcactacaatgtctgcttatttattatgtttattgcctgctccgcccactagcagaatagaagcccctagggcagggcggctggtctcttttgctctctaatgtttctcagcacccactgatagcgctcagctcagcatgtgttgagttaatgaaagcgtgcttgagtgaattaaatgaataaactccttctgcataatgatttttgctttggggttggcatctacattggcagtggtgttttcagcatgtttaaagattcctcctgtggaagggacagtgctcctacccatttggaaattgcaacactcgggatttgggatttggcccaagcaggtagatgctggtggatcatcaccagggggagcagtgggcacattcagcagctgcttaggagaaactgcatggagcacccattgcaggggccaggatatcatcctggcagatggaaacagccttttgtcttccaaagaaaggtgcctcagagagctcttaagtacaaattagtacctagctcacaactagcacataagagagaggtgatacctctggcacgttttttgttctttcctgaactccatgtcaattaggattattttggttgcaagtgatggaaattccacatcagaactgtagcaccgtggtatgtggctggaaaacctctcagtctggaatctaggagtaccatttcctttcttctctcatctctatgttatttttttcagtttttagtggtcttcttttaaaataaaatagcctcgtgttacctaggggctagaagagattaacagtggcagtgaacactgatggcaggcttgcgatatgctaggcactgtaccaaattcttctcatggttgctctaaagctcctcaacagttagacagagttggttctaaagtcttcctattgtccatattttacagagacagaagttgagtcagagaggtggcccaacctgcccatggtcatatggtcagggttggggggtgggcgggattttagcctgcttctctctgctgtcagaagagggcccttcacccgaattctctgctgtggcagtctgtgtctgaaatcaaggtttatgatttagaagtaagagctttggattgtaatccactgaaatgtaacttgctacgtgagtgagctgagcaggaggagcctttgcatctgtttccttgcagctgccgcaacaaataatctcaaacttcatggcttaacatgacagaaatgtgttcctatacagttctggaggccaggagattgaaatcaaggtgtctgcatgcccacacttccccctaaggctgtggaagaggatctttcccagcctcttcctgatgctggtgttgctggctgaccttgagttccttggcttgaggctgtgtccctccagcctctgcctccgtccttacacggccttcccctctgtgtctctcttctcctctcataaggacaccagtcataagggcccaccctgctccaggatgacctcatcttaactaattgcacctgcagttaccctctttccaaataaggtcccattctgaagttccaggaaggccatgggtcttgggggcctgctattcaaccaggacagtgccttcactggagcatccagaaaaagccagagtggatgacctggggctgacacttcctctgcatactttttttggtgtggttcctcactgtcacccggcccactgtgttgagcctgtgtcctttctgacactcccccgtaggaaggctggacaagacagggctgggggtgaactgaagattaagttcaggtttgtacgtggagaggctgtggtccctccgagatccaagcagaggtgtcaggcagccagctggttctgtgattgtggagctcagagagaagccagggctgaggcatgtgtttaagatctgctgcatatgtggggttgataccgtcggggaggacctggctgcctgggagaggatatagagtgagaagaggcccgagccttggaaactccaggcttcaatgagagccagagcaagacagtctataaagaagatagaaaccatgggaagtggccttggggagagggagcaggaggtcgtgagtctgggagtgggtgacggagtcagggcgggaggacaacgttgtccggtgggttcggtggccaggagagcactggtgaccttggcaggagctgtctggtggtgagggttggggagttgtggccaggcaggagagggtcaatgactgagagggagacatggtcctggagacggagagagaagccagctctgccaagaagctgagctgcagaggcctggctgggggccggcagtgttttattgtatctcattaaagtgagagagacaggagcatacactgatgtcagtatgcatgtcaggttgaatatgtatgtgcttcaacccttagctctgtctcctctgtcttgtgggagtgacggggaacaagccctgggctgcgggctgtgcttgctctgtgtctggagtttactgaattcagttgacccaggcccgagacactgctttgacctttccctgggccgaaggccccaatttggggagagatttccttggtcatgagcccctagggctgactgcttattctttctccttttcagatggatgagatcaaagggaaagaccgtgtgattctggccttggagaaggaacttggcgtgcaggctgggcagacccagaagctgcttctgcagaaagaggctttggatgagcagctggttcaggtcaaggaggccgagcggcaccacagtagtccaaagagagagctcccgcccgggatcggggacatggtggagctcatgggcgtccaggtgaggggcagcagcttgtgccagcctcaggctggtcccccacccatttaggtggcatttttctggtcagccacagaggactctgaggtagcatgtattcactcattcattcattcactcagtattggaggggatgttataagttctttgtgctggacgctgtgtgaggtgccggtgcgtggcggcctttgtaagagatacggggtgggaggggcctgaccacaagggccccagggagccacggaagggtttgaagtctcagtggccgtctagatggagtcttccgcaggtgtgcagtgggcttgggtgttccccaccttgctgtgtggcatgtgggcccctgaataaggatctcacccattatgtcatgtgaattttctaagaaggctccacacaacttcttcaaagtacatttacgtcttgacttttttttttttttttttttttttttttaggatcaacatatggacgagcgagatgtgaggcgatttcaactaaaaattgctgaactgaattcagtgatacggaagctggaagacagaaatacgctgttggcagatgagaggaatgaactggtaagtagccccaagagacaggcggtgcctcatagggtgcaaggaaggggccctgagtccctgaaacatgccctgcacagaaagttaatgcagaagccttctggttctctgaactttccttcttacttcttttcgattaaaaatctaacacatgctcattgaagaaatctcttactgccatttgtttttgtaggaacttatctttagcaaacaactggagaacttccatgagaagcatggagaggatgttcattgcagtgttgtttatgttaacaaccgaaaccgaaaaaaatcaacaattaaaaaaccaaaaaacccaattgttcaatactaaagcgtagggcagagtgattatggaatatttatacaatgaattctagactgtcattaagattgatgatggagaccctctttaattgaaatggaaacgtgttcatagtaaattaaatgaaaaatgcattttacagaacaataatacattgtcatcatcttgaatattagaaattattcttttttttttttttttgagataaagtttcactcttgtcgcccaggctggagtgcaattggcaccatcttggctcaccgtaaccttcacctcccgggttcaagcgattctcctgcctcagcctcccgagtagctgggattacaggcatgtgccaccatgcccggctaattttgtacatttagtagaggcagggtttctccatgttggccaggctggtcttgaactcctgacctcaggtgatctgcccgcctcagcctcccaaagtgctgggattacacacaagagccaccacatctggctagaagttattcttttaggtggtgtaattatgggtaattttaatttgtgcttatgtatttacttttttgcataaaattttatatacttgtaaactaaaacttatacattaattttaaaaataatgaacatggacttctggttaaaaaagaaatctccagtaaaaatagaaatttcatgaatatgtttacattttctggataacagcaaaactaatttttacgtaatggcagttgatacatcaacttcttgacagatgcctcataatttttatgtttattctaatttttattatgaagagaagtatatccacagaatatttgaaaaaaatgaggggtgaaaagtgtccgtaagtatcacctcttcacaactttaataggatcaaaataaatttacttccttccagtatttttaaatgtttttttttttttggctttaatcagactgtacatctaatattatgtctctactcttcatttaaatatttataagctcataaatactcatgagctgcatagtttactgagtggattaggaaaaaacacaggcttctggaaacatgtcagatcagactgaagtagttaaaagtagaaactaataagtttgccaacgcttcaatcttttttttttttttttgaggtggagtcttgctctgttgcccaggtttgagtgaggtgatgtgatctcagctcactgcaacctctgcctcccgggttcaagtgattctcctgcctcagcctcccaagtagctaggattacaggcacccgccaacacacccggctaatttttgtatttttagtagagatggggtttcaccatgttggccaggctggtcttgaactcctgacctcaagtgatccgcctgcctcagcttcccaaagtgctgggattacaggcgtgagccaccgcgcctggcctcaatcttaaaatcatgaggtaactactgctagtttggagtggttcttaaatgttcttaatgtttaaataaataccttaaaactcaccgagagactttgttttattttatggatatgaattgggatttttttccctgctgtgtattgttctgcaacttgcttttttcacctcattgatcaattacatcactccccatcagtgcttagagatctgtctttgtctttttaccagcggcttggtagtccattgtgtggatataccatggtctgttcacctctcttcccagtggtggatctttaggctgttgccgctttctggatttctgtgaggtgccacatgcctgtaatctcagcactttgggaagccaacgtgggaagattccttgagctcaggagttccagcccagcttgggcagcatggcaaaaccccatctctaaaaatacaaaaaaattagctgggtgcagtggtgcacacctgtagttccagctacttgggaggctgaggtgggagatcacttgagtccaggacgtcaaggctgcagtgagctgaaatcacgccacggcactcaagcctgggtgacgaagtgagaccctttgtcaaagtgacacatgtcattttacctaccttctgtctcgaaaaaaaaaaatgccatgtagaagatacatatgggtctttactgactttacataaaggttcaagtcagtaaagacacgtatgtatcttctacatggcatttttttgggggggcggtaggtttctagaagtagaatgcatgggtcacatggtacattttatatttcaacctataccatcagaatattttaccttaacatttacagcctggggagtaaacgcaggggtctagagtcagtcccttgtgtttgaatcttggtgaactcaaaccgccaatctttgcaaaagtgcaaagcattcttggcactttctttgtgaagttgggcccattgcctcctctctttgggctcaggttctttgtctataaaatgcggatggggaaggtggccccttcacatgtgttggctgtgcctgtggttatcatgatattgatagatatttaagttgtttctaattctttccatgaaaataacactgggagactaccactatgcattcaattctcaccatgtgcctaggagacaggagctgccgtgattctcatttgatagatgaggaaactgaggctgagaacttgcccattgtcatgcaactagcaaacaaatgtgtcatccaggacactggcctcagaaggggtcctaactgggttgagtctctgctcacctcggtgctgtgacctcggccgtccgtcgtcaagttgtctgagcctctgtgtctgtttccaaccacagctgaaacgctcacgagagaccgaggttcagctgaagcccctggtggagaagaacaagcggatgaacaagaagaatgaggatctgttgcagagtatccagaggatggaggagaaaatcaagaacctcacgcgggaaaacgtggaaatggtgagctgtggaccccttggggacagccctgacactcccttctctgtctgggattcttcagccctgaacctcccgattcacatgttctggggcgcacctgctgcccacctccccacaaagcaccaggcacagtgtcagtcacagatgtctcgcctttctctccacctgtctcacattcactgtgctgtgggtgtttgtgcccagagggagtcagacagctgtgtccttaaacacatcccccattctctctgagcctctgtttcttcatgcataaaatgggaatgaaaatatccacactggaggatcatcaagaggatgaaataacagcatgtaaagacctcacagggaacgggcccagaggacacccagcaagtgaaagctgttacaatgatcgctggcgatgctctgcagaggggtttctcctccagctaggatgcctggtgtttgtggtcagggcaggcgtcttgtagttgacagtttacagaatgatttcaggttcattgttcagagtagtatcaacccccactttacagccgggaagacggaggctctgtcaccacacatgctctgctgtctgcactgtagcagatgcaggtgtgtgtgtgtgtgtgtgtgtgtgtgtgtgtgtgtgtgtgtaattgctgttgtgtgaagtcctctccttcccctgccttcccctcccaggtttctaggctcatttcaaatgtcgtcttccacccccaggccctgcgcatcccttcctgtcagcagtgtgcatggtcagccccaccttgggcttggctttggtctgccctgtcccctcttccagcacaggacaaggtggccacgtattagtccattttcacactgctgataaaggcatacctgagactgggtaatttgtaaagaaaaagaggtttaatggactcacagtttcacgtggctggggaggcctcacaatcatggcagaaagctaaaggcacatcttacttggcagcagacaagacagactgagagccaagtaaaaggggaaaacccttataaaaacatcagagacttattcacaaccacgagaatagtatgagagaaaccgccaccatgattcaatgatctcccacctggcccctcccacaacacacgggagttctgggagccgcaattcaagatgagatttgggtggggacacagccaaaccatatcaggccatcatctctttcatcctcccatccatccttctgtccctgcacccctgagctccactccagcactgtccctaacaaacactgttggcgggtaaccctgtggtggtctgtctccctgtggctgcagaaagaaaagctgtcagcgcaggcgtctctgaagcggcatacctccttgaatgacctcagcctgacgagggatgagcaggagatcgagttcctgaggctgcaggtgctggagcagcagcacgtcattgacgacctctcactggtacatctagcacagctggcgcggctgcccctggcaggggtggcaccagctgacatgggtgtcaggaacgggtgttggggctcagggtgatgctgctgagctgggtcagggtcaggcagtgctgactttgggactcaccaagctcaccctggtgtgcacattcccgcttcattctgccactaagcagccttggcttaaatgagatcactggtacttggggacagtttccatggctacccttttctcacatcttctccctagcttgctgtgattgagaagcatcagttttaaggatgtcttttggcctttagagactgggcatgatctgttccagagaaggctttttgtttgtttggttggttggttggttggtttttagcttagcagttgcagactgtgagtttaggcccacaaacttgaaccttataaccagaccagcaccttgctaagactgcctgtgtgagttttggacgtgtatatggggcgtgcatctatcaaagggggttgagtatgtcctaagcggtggagaattgcatccagagaattccacagctctctgtgaaaggaacttcggcaacaggcagagaacacctgcagggagctttagttggatcttagaagtagaacgtgttctgctcaccaaagtgggtgtgtgatggttccatgcactggttttcaaagaatagaaaagctagtgatcaaaattctagaaaaggctttgattataattttcatgttcattttgcctgcctccatctccctctacctctttaacttctctctttcttcctttcacccatccatccatccatccatccacccacccatctgtccacccatccatccatccactcacccattctttcatccttccatccacttatctatgcatacatctatctatccatccatctttgcttcattacacaaaagactcaatgcagcttaggatgaaaaatatatttcagtgaaataacaataaagtcaaaaggtggataataaactctccctgtagctctcagttcagagaagcagccatcacttgggcacttagaacttcaactagccatgcctggtgcgggtgggcaggcccagctccctttgagagccagtggctttggtttgtgagatgtgaggctggctggaaatgccaaccgttgtgtttccttctaggagagagaacggctgttgcgctccaaaaggcatcgagggaaaagtctgaaaccgcccaaggtgagcctgcgatggtgcacctgccctaccttgccgctgtgtcacggatctgcagggcagatgggtcgtggagtggggaggttttacagaggggtcctgaagcagacacacacatctctgcatgcctgatgatgaaaagcctgtcatcaccgtctctcaaagcaacataaatatggccgtgtcatgtgacccagttattgtaatttattcatggaaaacttcctgatgtattctccacttaggcttcagggtatattcacccaaaattaaaaacataaatacttaaaccttttgaaggatttaagggacattcagggttggtttatatgagagcatatcctgttctaaaaaaatcaggagctttgtgtttttttggaatcatgcagaactgtagtcttttttggaaaatataggtcttttgctatttcctagtaacagtgtctgaaggagctgggcttataaaattcaaatgcccacagggaccaatctggaatgtaaagagcgcactggagctgataccaaaaaaaaaaaaaaaaagcatagtttgcctttaaacctgtaaacctatttttggctcccacaaagacacagttctcctctccatttttttttttgttttttttttttagacagagtctcactctgttgtccaggctggagtgcagtgacaccatctcggctcactgcaaactccaccacccaggtttaaatgattctcctgcctcagcctcccgagtagctgggactacaggcacatgccaccacgcccggctaaattttgtatttttagtagcggcagggtttcaccattttggctaggctggtcttctctcctttttattgaacacaagtgccccgtttggtttatcttttgatggagatgtggttatagagaaatatttctcatctataagggaaacagctgtgcaaatgtgatagtgaatggccaaagacatgtggtcttggtgtcagggtgacaacagggaatggtggggactgtggcaaactgggccctgaatcctggttgctataagaaggtggaccgatggcatcagatagtccagtttttcaagggaaatataaatccttgtatgttagcttcctagggctgccttaacaaagtaccacaaaatcagtggcttagagccaccgaaaaagaccgggcacagtggctcatgcctgtaattccagcactttgaaaggccagggtgggtggatcgcttgagcccaggagtttgagatcagcctgggcaacatagcaagaccctgtctctacaaaaaattaaaaaaattagctggatgtggtggcacctgaagtcccagctactttggaggctgaagcaggaggactgcttgagcccaggaggtcaaggctgtagtgagtcatgattttgccactgagctccagcctcagtgacagagcaagaccctgtctcaaaaaaaaaaaaaaaaaaaaaggaaaggaaatgtattatcttacagttctagaggccagaatgctgaaattaaggtgtcggtagagccacgttccctccctctaaaacccgtagcagacccctcctttcctcttcctagcttagagtggtttcccagcaatctttggtgtccttggtttgcagcttgaactccaatctctgccttcattgtcagtgacattctacctgtgtgtctctgtggcttcacatataaagccaccactcatgctggattaggagtccaccctactccaacgtgacctcatgataatttaactacatctgcaatgatcctatttccaaataagtcacattctgaggtactgggattaggacctcgacctatctttttggggggatacagtttaatccataacaccttactttatatgaaattgaaggatttaaatgctggattttaaatgtctgtaattttatatgtccaaatacaggttgaacatccgtaatccaaaatccaaaaatccgaaatccaaaatgctccaaaatctgaaactttctcagcaccaacatgaggccagggaaatttcacacctggcctcatgtgacaggttgcagtaaaaacactatcaaaactttgattcatgcacaaaattatttaaaatattatatacaattcccttcaggctatgtattatatataaagtgtatatgaaacaaatgaatttcatgtttagacttgggtcccatccccaagataccttattctgtttatgcaaatattccaaaatctgaaaaaacatccaaaattccttctggttccaagtatttcagataaaggacactcagcctgtaaaatatatacctgtgggccacataaaatatatctatgggtgcaatttggctcccaggctgcctcctggtggcctttactgcagcgttcaggtaatgccacttagagtggcctggctcattggtgatttgctaggtcctggattctcagatgagtgggtatttaaacaatctcattgaattctcacagccaccccatatagttggtattattttttcaattttacagctacagaagacatatatatatataatatagaaaaactcagagaaaaattaaattgacaaggctgagtttcaaactcaagtctgagactacaaggcccaagcttttcccaccaagccaagtcgaacacggggcaaatttctgcacattgacattagaaactcagaaataggaagtggtttgagtagaacttgtctatatttatttgtttgtttgtttattttattttttatttatttactaattttttttgagatggagtttcgctcttgttgcctgggctggagtgcaatggcacaatctcggctcattgcaacctctgcctcccaggttcaagcgattctcctgcctcagcctcccaagtagccgagattacaggcatgtgccaccacgcctggctaattttgtatttttagtagagacggggtttcaccatgttggccaggctgatctcaaactccagacctcaagtgatccacctgcctcagcctcccaaagtgctgggattacaggcatgagcaactgcaactggccattcttcctgatttctgaatgtgtttatgggaggagaaattcacaaagggttggaattgaatcgtgatttgctacattgcctgtacaacaggcaaggacaggggctgtgtctgtcctgcccactgtggcctgttcattgcctggcacagagtaggtgttgactaaatagtccctaaatagttgttggctaaataagcgaattgcctttactggaaaaatgtacttgtatgacactggattgttgcagaagaacggtgatgtgtggtcactttaatgaagatagttccgtgtcattaggaggccgaatttggggatctgtgtagaaactttcctgaatgggtttagggtcttttctattcactgtttcctgggcccaccagcattttttctttttctcaagattcagtgtagacttccgtgtggaccaagttttctcccatgttcctacttaatcctggcattgtgcagggctggattgaattgatacttggatccatcggggcccaagcaggttttgtaatccagggttgccttttaggcctaagaagcttctctttcttctctaccacaggccacaggcattcagtacacttggctttctgtatctgtgggtttcacatccatggattcaaccaacctctggttgaaaaccttcaggaaaaaaaaaatggatggttgcatctctactgaacatatacagactttttttccttttctttttgttttgagatggagtctcactctgttgaccaggctggagtgcagtggcacgctcttggctcactgcaacctccacctcccggacttttttttccttttcattattcactaaacaatacagtctaaaactagagtcatgcattccttaacaacagggacacattctgagaaatgcgtcattaggcgactttgtcatgcaaacatcatgaagtatacttgcacaaacccagatggtctagcctcctacacacctaggctattcagtctagcctgtggcttctgggctgcaagcctgtgccgcatgctactgtactgaatactgtaggcagttgtaatccaatggtatttgtgtatctaaacatagacaatgtacagtaaaaatacagtgttatgatcttatgggaccgttgttgtatactgttgaggactgagatgctgttatgctgcacataactgggtttacagggcatctgcactgtattaggtacgatattataagtaatctagttaaagtgtacaagaggatgtgcgtaggttatatgcaagcactacaccaatttgtataaggggcttgagcagccatggatttgagtattcgtgggaggttctagaaccagtcccccatgggtaccgcaggatgactagactagtttctttttcccctgaaatgcccccatcactctctgtccatcacacatggaagtgttttaacactttgccaaaggctttgcttgacagagtactgtggtgaatgcattgaaagttccagaactttccagaaatctgacagccccatccctactctccagctcctgactttctgtcagaaagaccctagcaaacctccctggactccctgcaggagggtgcctccagtccactcccacaccccagcttgcagaagatgcagtcagggcagagccttgcagaagatgcagtcagggcaaagcagagggtgtccacctttgtcttcccggagcgtttgtgtccctgagggccatgactctgccttactgggcctatccaacagtccccttatgggatctcctccagggacaagattggtgctgattatctcatttcccagggagcctgctggttcagcgtgggctcacgttagccccaaaggagaggttggaggagaaggatcctgagtggttcctcggactgtgccctggggactggggtagggggcttgctcaggacctgggcctctggccatgtggcagtaaattgtgttgcaggctattggaacttgcacagaagctgtatcatcacagagttctaagcatatgcataatggctaaaaatcagtacagtttacgcacacaccttggttgaaagaaggacccatcattttggataaggttgggaaattgtagccccaagcagtatgggagtcagaccctagctactagctggatgggattggccaagtcatctaaacgctcagaacctcagtttgattcttaaaatgaacattatatccatgggatctaaggaagcttctggttctttgcttggtgcatagcaggttatcaggaagtcagagtgtctccttcttcctttaccttatagctcaataactttcctttggagggcctgtgaaatgcagattcccaggccatgcctacaccctgcctcccccactaatttataatagtgaggtgggatctcaatgccctttgcagtaatcatcctttaagggagggctggggactgcgctgggaaccatcaaagcacattggaaggagaggccctttcttgggccagtgcttcagtgctgtgtcccctcctccccaaatgactctgggtctgctgttgccaggggttggaggatgcctgaggtctggcgggccatttttgtcagtggctcttgcatccattctgatgggacctatcaaaacacgcaggacctatctaaacttgactcctagccccacgcccctgaggccaagcctgctgcctgctggagggaaggacacccctgaggccaagcctgctgcctgctggagggaaggacagacactggcagctggttgtacagtacctttgcctgcctaggaagctcaagcacttttttttttttttttttttaagacagagtttctctctgtcgcccaggttggagtgtagtggcgtgatggagctcagctcacggcaacctccgcctcccgggttcaaccaattctcgtgcctcagcctcctgagtagctgggagtgtgccaccaggcctggctaattttttttgtatttttagtagagacagggtttcaccatattggccaggctggtctcgaactcctgacctcaagtgacctgcctgcctcggcctcccaaagtcaaacattttttcatcatgtgcatgcatttttcatttgcaagttttgccaaagctacccattttttccttcatggttgtttgcagtcgatcttattcctaggctgccttccccacggctgtcaccagtctgtgagctcatgagggctggatggtgccctgggatccagctactcgaagctgctggcacagtgccctgcactcagagaggctaatagtagtgactgcgtgaaaccagtggctacttcatgtctgtttacagggctggcctcggttggtgtgtaactgtgggccctttgctgggaggggcgagggcttgttcccttctggctcagcagtgtccctgtcacctggtccctcctccacagcagccatcaggactcatttcatgcagctctgatcaaaggtaaagagggcatgggcagcaggactttgtcccagcctcgccagctgagtggctgatgtaaatcaaaaagtctctgaggcagctctcaatcaatttagaagtttattttactaaggttaagaatgtaccctggagacagatctgagcctttctccaaagatgattttgaggggttcaatatttaaaggggaaaagcgggctggaggggaaagagggggtgtgtggtcacatgactgaatccacaggttgtgagagaaacggagcaggtaggggaatagtcctaattatgtaattgtcttgtgctcagtaaatcaacactttacataagataaggtgaacatggagcagctacctgtagagatgcttaaccttttctctgcagctctctgcttaggaacaaaaggaaaggcagcttcttgcatgactcagctttcagcttaagtttttctttttggtggagtgaactggggttcagagtttttattttcctttcacagcgggctctgtgccagaagcatgggaggcccctctgagcattgctccatgtcccacctgctgggggccctttggtaaaggactcggggaagatgtgggtcctggggataggacactggggtgattatgaagagacgggggctgtgtcctggaccacatgcaggcgtctcagcagacaagcacacacaccgtctgtgccggtcctggaggtaccgccagaggagctgcagctggtgtgggtagagcagagctcgggagcctgacctggccacagaggccgactgggtaccttgtccagggtagcaaacaccatggggacatccaactcccatttgcagacttgggaagggacaggtgccattacctatggtggttctaggtaatttgttcacacagggaaggaaaccccagcgccaggagtgagcagggtggtgagtcctggtctcagggagaagctgctgcagaggctgggtctgtaggtgcccggcctcctgcctagtttcaggaggtgacttcaggccccgtggggaggggcttgaggcaaaggttccagattgcagccccgcccctccaggcccctctgtctcaagtctgcactgcctggggccaggcccaggtgtctcaggtctgcactgcctggggccaggcccagctgtctcaggtctgcactgcctggggtcaggcccagctgtctcaggtctgcactacctggccgggtggtgcctcattaggaaacatggcttaaagggtagtcggcactaaattgagtagcacaatccagtcacacagttcatctgatggaaacttccaaaggaatacagcatcatgcattgttgaagttgaaacatacatgaactttgctatgtacatttcttttatgaattatccattgccctttaatattgctttggtatctgtcaaagttcagacgttttacttttttgtggtaaagtctgtccattttttctgcagcatgagagtttttgcttttgatattatgtctggtgacgcttctccgagagatggaagactctcagagacatcccttctgggcaggtgaatctgaagactttgatctagttaaaaaaatcagtttttctattaaataatggtttgttttggcctataaaaatggtaaaacgctgacaaattgatggtagagaagccagtgaatttggcaagtctagggtgcctatgaggttgtcggggaacagcagataaatttcccaaacacatgaggacagaggcagctcctcggtttgggtcctgagggagaatctatcgtggcgttgccattgctagtgctgccccgggggccttgcgattgtctggggacccagggcctgtgccatggtgttgacaacaggctctcggctcagggaggacgggatctgggaggaaggtccccagagaataaactggttcggaggctgtcctctgtgacgaaggcaccctatcccgcccctggaaacctctcccttcagcccgcggttggcgtggccagcatctgggctctgccctggagctggcttcccttttactgaaggtgcgtcttctggcgcactcctgttctcgggactctgcagcagacgggtccacaggaagccgtggagttgctagggcgggtgtgttagaggaaaggggagtgcgtggggagagaattggtgctttttccttggactggaggaagccctgaaaatggatgccgacgaggtggcttttgcctaagcccacgcacaggggctggtgtgtctgcagcttcacgccaccatggaatatgtcctctttgtgctgtacttctctttcttcctgtgtctctgtgccctggtgtgcctgtacttctctggctgccaggagatgacctataagcatgaaggtaggcagctggttcggggttttgcgttttgaggttctctggcggtccctggctgtggccgaccgatgctcctgcctgtgacaggtggctctgttgaaaatgataggaaggtgagaagacaggtggctgagagagactggatctggttggggggctatttgttttgggggtacctcctctttttccctctgcttcatctgacccgctgaggaagagcacctctgtatatgcaaagtgtaaatggaggagacatgtttactcttcattcattttgccaaaactgaatctttttttttttttttttgagacaggatcttgccctgtcacccaggctggagtgcagaggcacaatcacagctcactgcagccccaacctcccaggctcaagtaatctttccacctcagcctcccaagtagctgggactacaggcgtcagccaccatactcggctaactttttaaataactttttgtagagatggattctcactatgtggcccaggttgatcttgaactcctgggctcaagcgatctttctgcctcagcctcccaaagtgctgggattacaggcatgagccactgtgcccggccaaaactgaatcttaatctgaatctggattcatctgtagaaacgagtcaacaaggagaggctttggttgcaaggaacatggaaggctagaggaattacctttttattcagtagatgggctcagaatgagcaaatggtggacatttttgctcctaatgtatctcttgtgaggaaaaacctagagactcttagaagagtggagacacaaaaaaatgaagtttctttcatgtttgccattttttttaaagcccactgtgtgccagtcatgacaggaaacaatgttttctgggcggttctcccctcatctcttgagaagcaggtggtgaattatttcctgcattttttgaaaatgcagtgcaaaaccagttgcattgccttcaaggaagatagccactgtgtttttactttaaacattaatatattgtttctattttttattaataaagacacaaatatattgagaaatcgagtacatgtaggcttactgcataatataatcactcaacacaacttttctctaaaggaaacaaactaacccagtgttataaaatgttataaacactaacccagtgttataaaatgttataaaaaaatgttaaggctgggcatgatggctcatacctgtgatcccatcactttgggaggtcgaggtagacggatcacttgaggtcaagagtttgacaccagcctggctaacatggtgaaaccttgtcactacttaagaaaaatatatatgtacaaaaattagccagatgtggtggcacgcacctgtaatcccagctacttgggaggctgaagcagaagaatcgcttgaacttgggagacggaagttgtagtaagttgagattgcactactgctctccagcctgggcgacagaaggagattctgtctcaaaaaaaaaaaaaaaaagttaaaaaatttttaaaaatacccagcataaaaacctgaggggttgggtcccagacaactcgttgctgctatgggaactctgtgtgtgccgtgcctggctgtggattcctctgcattgctgcaggattcaaattggactgcccttttgtgtttggtttctgctctaagagctgcttcctctttccctcaaagcagcatagttctgtggagtcttggtctctggggccatatgatatgatactgtcgggggctccactgggtctggagttaggctgtttgctaaggttgctctactttaaacacaggcggcaacatcggtagttaatgccctgtattagggcttgggagttgagtccttaactagcagtcctgtagggttttcggcagcattggtagttaatgccctgtattagggcttgagagttgagtctttaactggtagtcctgcagagccttcacagtggatcgtcctaggtaattgagcattgagtcgttgcccccaggagggtccctgatgctgacgtggatggtcacagcccagcagtgtgttctaaatgtttggaaagtgtgtaacttgatgatgcttcctgggctacagcaacaaacagactcgtccccaaaggccttgcagttagcagtgtttacaagaaataaggtcagctcagtggctgttcagaaaaatgtggaacgtggagctcaggggggtgacctgcgtgtgcagaagagcttgagtgaacgtggagctcaggggggtgacctgcgtgtgcagaagagcttgagtgaacgtggagctcaggggggtgacctgcgtgtgcagaagagcttgagtgaacgtggagctcaggggggtgacctgtgtgtgcagaagagcttgagtgaacctggagctcagggggtgacctgtgtgtgtgtgtgcagaagagcttgagtgaacctggagctcaggggggtgacctgtgtgtgcagaagagcttgagtgaacctggagctcagggggtgacctgtgtgtgtgtgtgcagaagagcttgagtgaacctggagctcaggggggtgacctgtgtgtgcagaagagcttgagtgctgcagatgcatcactcccgtgggtgccattgtcaccatgggatgtcactaccactgctctctagagctggttggaagagtccatgatgcctgaagtcgggtggggttctcatccagaggggagatttgagtagatgattgtctccagcctctgcaaggagagaaatgacattgaagttgatggtgcccatagtcttcacgtacctgccaatgagactcatctggggcatgtaaccacatggtgcccaactgatgccagctgtgtgaatgaatggaaatggtgtcatgtgcaaaacaaaatctgtttgtggatagacaaactagtgtggctttgagttcattaacactgggatacagtcgagaacaaaagggccaaccccctgtcttcatggagcttccatttcaaggggtagggggaagaccatcagtaaacacaatagcttgccagatcttacgtcagcggggagatgtgctatggaaaggaataaagaaggaggccccagaggctggggcgggggtgaagcaggagggacctgggcatggtggccaggaagccttttctcatatggttgcatttgtgcagagacctaagggaatctagggaaggagacatgtggattctggggaagagcgtctcggagcgcaaaggccccatggcaggtgtgtgtggggtgcagaagcctggagcggaggaggagagggagggatgatgccagggcaggatgggaggtggatcctgtagggcctcgcagaccacttgtagcctgcctggatgttggtggttttaataattccagagagagagatattggtggctgggaccaagatgaaggtcccaatggagagagggggagagagggctggattttgagttgaaggtgaagacaacagggtttctcccagggagggcaggcatgagaggtggagaagacaggggaggactcctgggattggggcctgggcaactgaagcatgagctgctgctgctggactcaggttagattgcgggaggtgcggtgttgggggtaagtcactgcccgctaggattccacaatgccataaaggacgcagctgacgtatgagtctggagttcgggggagagtcgtattccccatgcatattaaaaagcaaggaggaatgtgggaggggtgatgcagtgagcagaaagacaggtgccaaatgcaagaacgttctgggtgacgtgtggtggtgggtgcctcccttgcagcaccttcagaaactgtgtaaggtgacaagggtgtccctgcatcttcttccttgccttatgtctgaattatttcctaatcacattattaactctggtgccagtcacatttttctcacatttacagatatctgggtaaaacactcaggctgggaggggcccttagtatgtggggagtgcctgggttttctctgtgggttgggggagctctgggtgaagtcatgttttggatgagccagcagagccttgggctgggctctggaattcagttttgattcattcttcatggtctgaaaggcattcattgattgtaaaaacaaataaaaatccttgtcgggggctgtttgggaaaaaaaaacccaaaaaagctatgttcctaaaataagagacattgatctggtgattgtgggttgaggtctgtagcccctaggggatgcaagctccttggggcagggacctggcctggttatgatcctattgtattccccaggcctgccccgtgtctggcccatagaaggagctttgccagtgttttctgagtgaatgaattgatagacagatgaatgaagccccatatcctatgatatttggagtgggagaagtgccagcagggcaactcagaggccgtcacatagagccttacaatttgcctctggatctgagtgatggtcgtgtgaaggtctattacatgattccttctcattctgtgaatcttcccagttttctataataaaaagttaagcagagattgcctctaagtgtgggtctggccaggacttgggccacacatttgccacactagtcagagtactaggactatggctgggctctccactccttcaagctgttgccccctctgctgtccttattcatccagttcttctccttagaactgagcatctccctggaccctgtcccccttctccttggtacagccagtgcgctgctcatggagcgtgacggagtgctgggctgctttctgggcacagggcatgcatggcccccttttgtgctcacaggtgaggtggcttctcaatccatttgctagagaaggaggctggtgctccaggggccaagtggtttgcacaggtctacagctggagagccagagccaggaccagggccagactagctcgctcaggctgtaaaccctagggtcatccgccacctgctgccaccttttatcccacccagtcagttacgaagcccaccaaccgcatcttgtgatgccccagtggcccaaatgtcaatcatcacccccctgcactggcatgcccacgaccagggactggtagactctggcaatcctcagtcgttgctaacatcatacaaattgcgttttacagaagcatgttgtggagacattttttggatttgatgaggagtctgtggactcagaaacgttgtccgaaacatcctacaacacagacaggacagacaggaccccagccacgcccgaagaagacttggacgatgtaagcaaacctgcagagagggcgggacctcaccccagatgctctcggggcggcacctcctgcttttgatagttgcaagtttcgctcccttgcctatagttctgaaccccagatgaccagttcctaccagtgcattatcaaagccaatggtgtgaagggaaggcgggccccacagctgtgggctccatgaatggcgatgggagggcagcacgtggggaccctttctttccccagcactgatttccccaccaaggaaatctgtggctgccaagttcaagctgagtcattgagggatgttgccttgggtttcctcaccatttgcaattaaaactgctgcgtaatggtctctccctggtccccacgcatgtgtgcacacacggacacaccaccgggcagaaacagcatcattgctttcttgactaagataaagcatgtaatccaaaaatatataaagaagaaggtgaagagccctgaagtcccatcaccccaaggtcaccgcctcaccctgtcctgaccacctgtgcccatctgggtgcatagccagcttcttgagcaaggtggattcgtgagggggcaaagaccagcttcgttctcactcaccttccccaggtgaattctttcaggagtgctgattacatctcaggcagaccttgtgggcttctatgccttccagtgatgggaataatcacatttgattaatttcctaaacagcagacttcattcagcgcagaccttccccttgctccccaccagggcctgcgtcaggcttggctgctgtttccctaccttgctcttctgcctcttcccatgcaggcccctggtggctttttctgagcccagggaagagcaagagtgggaagggggtgcggatatgccggggcagctggccctcagggcagtgccctccggcaggggcaggtggatcgcgctacctcgcgagggagcacttctccaggtctccacaagctccccttgctgtgctgcaccccacagcttcctggtgagggactgggcactgcagctccttgcgcccccacatcccgagtctctgaatggtccgcctcccacacacccctgcttgttgtccttgtcccctcctggtggcattttctgtggagtcccatctggaatgacttctaggctggtttcctcccatgggtctatttgccataggaaaatgtggcacatgctataggcgctggcacattcaaccccaaggtggccctctctttgctcttccatcttgtgccaaaactctaggggacacatgtcacctctgcaggtcgtcccctggacatcctttctcacactgggagagacacaccatcctccccgtcagcccaccagcctcagcccaagtgccggctggagggaggggccaggccagtgctggaggcacacaacagtccatcagcctgtcctgcacaggggtctggactaggctactcaggctttagggtcttgttctcagccatgggccttttatgtttaacttaaaacaggatgcgtgattttcagtttgctttttcccagccagtgatatgtaataggcatctttcagcaccagaacatgggattgcctcatcctctctcatggccatgtggggctttcccatggatgagcagcacgcactgatgagggatttatgctgtgtcgttttccacacctgtgaaccatgcatggagctccttcgtatttgtgtctttacacacttatgtggccatttttttttttttggagacggagtctagctctgtcgcccaggctagagtgcggtggcatgatctcggcttactgcaacctccacctcccaggctcaaggaattctcctgcctcagcctcccgagtagctggaattacaggtgcccaccaccataaccagctaatttttgtattttagtagagatggagttttgccatgttggccaggctagtctcaaactcctgacctcaggtgatctgcctcagcctcccaaagtgctgggattacaggcgtgagccaccatgcccggccatctctttaggataaattcccagaatgggaggtgctcagtgggaggggacaccctttacaatggagacctttgcttctggagttggggctggttccatggtaccagccctttctctcccacctgctcccacataactcaagtgattcctgtgggtgggagctcctgggaggagtgctgatggctgaggaggtgcctcctcctggcagccctttcctccaatgccctagttgcttcctggcaatgcgaggctccttaagcacctgttggcagcactgtgagatgtggtcgtttgatgtctaagttgaccctggcactcaaagccatagcaagtgtttatttatgtttattattaaaatcaatcataaatcatttattattgtaattttgcacttgattatttgttttcttctccattatgtgaaggccacagcccgagaggaggctgacctgcgcttctgccagctgacccgggagtaccaggccctgcaacgcgcctacgccctgctccaggagcaggtgggaggcacgctggacgctgagagggaggcccgggtgagtgcagccagcctcagggctcgagggaggggccgaaggccaggtcatgtaggtcctttccagaagtgtgacataccctggcttggacactcagaggggattctgagaggtggtggggaacccatagcaaggtctctgctgtggtgacattctagatccctctctgcatcctcggtgtgatggcaggcgctctggaacattgagctgttagaggaagcaacgctacatatcacctgtgccgtctgtttggaggagagcatgtgttcagaatttaacactaagtgatgaaatcacagacttggctggcttgcaggcttcaggctccgctccctccagggctgccagccccccgccctccaggacatccaccagaacacttgcagggactctcagggtgctccccagccaccaaggcactctgggccctgtgaccacctcagtccaggccacgccattcctcaggctaggctgagctctgccttctggaaacttccatccactggcccttctcccaccttcgggagtcacatagactggggcctgctctcgcttcctcctgggagtgtggaggactcccggagagcacacacgggtgcttccctgcatcccctcccccatctcacccccacactggccccctgaagcaggaggaattaacccgatcttccgaatgaggaaacaggctcagaactgagcaacttgcccccaaatacccagatgatgctgaacagagctgggagtcgaggccaggtttctcggactcagggcctgtgctctttctcagagccctgtttgggaattccacaaatggatggattttggtagtcttaaaggcgatgggccagaatggggcattgcctggcaaatctgatggcaaaggcagagaggagaggccacgcccacgtggagtttgttccaggggcagcagtggccctgtagcggggagccaggagtaagggggagtgaggtcagcagggagggaagctgcttgtcccaccataaaaggcccagtctttgtcatctaggtcagaggagggaaactgtgaggctttgtgtgggctgaataatttttgtttcgctttttaaatttcatctacttgccaacatttaaaaatcaagagattctatagagaaatccaggttcctgacctctcttgaaaggtcagaacatctggcagcaacaggcgtcccatttcttgtggctgctgctgggtagcagtgtctccctgagatgggacgtgtgcctctggcttgccacagtccccaccactccctgttaccccacacccagttgacttcccttatttatatgactttcttggtgcttgaagtattttgctttgcagctcctgctgcaggtgataaggggcctgggccaggggctatgcaattgtgccagcgtgttgaagtctgatgatggctgaatgagcttcaggttcagtaaggattggacttggtcagagagctgggcctgggcccccagtgtggctggcttctggctcactcacccccttcaaaaacagggtcccttctccaggcttcattttccttgcctgtaaagccaagcaagttttggtttgtaaaaccaaacaaggctgttctcttcttaatgatttttgtgtttgaagctgagccatgcttctagtaggccaaggttgaatacgtgctcctaaaagtgaacctgttcctaaggtttgcctataaggaccctaggcattgcttgcattggggcatgacgctttccgcttccctgtcacccattggaggtgacctgctcactgcctggtcttttcccttccagactcgggagcagctacaagctgatctgctgaggtgtcaggccaaaatcgaagatttggagaagttactggttgagaagggacaggtgagcaggagtgatctgtgctctgtgaatcttagcctttctgtccccttggtggtatccctggggctcgcccttgtgccaagggggacattctgtggggctggatcaggagctccagagacgctagaggaaaaaacactagcagaacccaggcacgaatgtgctccctactgtacctgtgtgccgagttaaaaaatcaaaacaaggtatggcattctaacttggctttttctttgtttgtttgccaaatgcacaaaaaagaggtaattccaaaagcaaaggtgtgatcaaagctgtttttgacttgaacctgaagaagagctgtcattttctatcaagattttaattgtgaaaatgaaccagcacccatgactaaccctgggttattgcagaggccccacctctggcctctgtgtcttagaacagtctggtcctgtgctgctcaggttagagtcaactgcacctacccatccactgcatttgattaggcaaggctggttgacagtgagacacagcagaaaagcaatgcctgggcctagacctgtcccctggagtgggggagccagagagggctctgggtggaaatctggcctctcggggtggcatgcgaaggttcgtatgggtcggcctcctctgtgtcagaagtgctgctgtggtgacataacctgaacgtctccctggctccatgtgacaaggtgtattctgttcacactcctgtttctcccaagggcctctcagggattcagggaggggggcaccaccatcttggaactgccccatctcgaacttttcctctgcttggctgtttgctgcctcagcaaaattcatcagtcacgtggccccactaacagtgagggtgccaaggagggtgtgggcagacggagtgtctggtggcccccacccctgcctgcagagaggcatctatggggggctgaggaggccaggcaaggtctaccacagttcctaggcctggtgggatacagtgggaggaggcgggtgtgaagcaaggggtgtaagaggttccaggcggcttaacagaagcagctccagaagagcactgcaaagctgcaaagctgcaaagctggcagctcagaatggctgccgcagggctcggggttgagactgaggttcccatggaggcggacggccagcgaccagcatgcatgcctggcacagagcaggtcaccacagcagactttaccaatggactgcgtgggggaatgtgagtgcccagccctctggaatggcttctctaaactgtggtctgcatcctccatgcggtgggatcgtgacgcagagctcacatgctatagctggccacctgggtcagagggcagctctgccacttccttgttgcataaccttgggcaagtaacataatctctttgtgcctccgtttcctcatctttaaaatggggctaataataatacctaacacattaagcaggaggacagaggagaacccaggagtagctggggcagaaatccaggtgcgagatgataaggcttttttgttttttgaggctgctagcctcagtttccctcttccaggctgagcccacatatctgtaacttgcctgatcacagtctataactaacttagtgttgtaagtaaatgcttattccttggcactgcaaggaaaaattagcattcagacaaaaagttttctcagcaaggcaattttcctttctgcagaaagggtgctgcctgtcagcagtcctgccacgagagcacattgagcaaagaaaagcagggatatttattccttatgcattggttccttactgctgtgtcctgtctccattggctggaactggacctcccagtctaagctagacccaattgactaataacttaaaacttttctagataggtaaaggtaatagagaacaaagggaaagaggaagttgctttcgaaaagacttagagaagtaataacatttccaaataaggaagggacataagctgcgagctgggacatgcttgagcaagtctataacaaatatcttggttaaagtacaaagacatagaatgtacttattcccttatatctaacagctacataggaggggcttaacaaagagttgttagtataaaggcaaggaggcttgaaggaagttagtttttaaaaagaaactattatttttaacacttatgatttattctttcataagaagggaaactttgaagaggaacttttctacttgccacacttagcctcccccaggggggtaggtcctctctgtgtggcctgctctgccctccatgcctgctggaggatggcacctgtctgaggctgagcctgtgtccattcatccagcaagcacttcccagaactctcacctatcccaggcccagtgctggtacctgggacgctgaatcagtttgctgttgctgagtaacaaaccaccccaatacttagttatttagaacagcaggggttctatttgcacacagttctgtggatcagcagtttgggctgggctcaggctgggcacagactgccagctcccggccaggtgcctccacctcagggaggcccacctggcttctttccccatggtttgggggcaagcccaaggcccaaggatggtccaaacctctgctcaggtcacctctgctaacatcccagtagccagagcatggcatggcccagcccagctttgaggttgaagaaatggaccccatcacctgctgggaggagctgccaagtcacatggcagagggggtgcacacagaggtgggagggagtgttgcagccatttttggccacaatatgccacagacaaaaggtgggtggagcacagccactcctcacaggtgctcgcagcctggtgaggcccacacatggatcagcatgaggatgatgcaggtgccaggtgccagggagacagaagcctggaggcaaccagggcctcttctgtgcattccatgtgcttgggaccagaccctaggccgggcctctgcttctcagcatcctagaacaacaagactcagtgagcccggcccagcctggtgcttgggaggggcctcagcccagccccagctctgtggctgaccagcagagaagggaggagggagttggagagggcttcccatgcgtttacttattccttcatccatccattccgggattcacagagtccccctgtccccatgtgacaggcactgtgccaggctcagggtgccacagcgacaagacggacttggtgccgtgtgctcacaggacttatgcaagaggatacgaccaggcaaagaaacgtgggaagggcatcgcaggcagagagagtggaatgaacaaaagcatgtcagtgtggctctggccagtctgcggggtatgaggtcagccttccgcatgcgtggagggtctgccagtgtggaccagtcaccctggaggcatgtttctgttaattagacggacagaatggagtcattgtgcttttgggaatgtgaacgaagtggagaagggatgccccacaaaccagccgtttctctttttggggtttaaaagtggacagggacaatgagggcacatcacggctgtcattttttatgacctttccatggtcagtttcatagaaagtgacctttctcactaaaagtttgttacttgaccatctgtttgcttccatgaatgtgaccatatttagtacttttccttaggattccaagtgggttgaagagaagcagctgctcatcagaacaaaccaagacttgctggaaaaggtgcgtgaccccacctcagggaagcacacagccgcagggcagttgggaccccgcgggcctgctcagactacacgggtcgtgcccagcgccatttgggcactccagtgaccagggcctcgggtcctgcacacctcccatgaggagagatgtcttcctcacatggaatcaaagccacatctgtggttctatcctctgggaccaggtctgcagagctggtttaggtcatcctccttgggtactccacagaaatggagaggcctggcctgtcttcccaggccactctgcagaaatggggagggctggccccaacctctggggataccctgcagaaatagggagagctgccctgtcctctggggacacctgcagaaatggggagggctgccccaacctctgggacccctgcagaaatggggagggctggccatgtcctctggggacaccctgcagaaatggggagggcaggttctctcctctggggacaccctggagaaatggggaggacaggtcccaacctctgcagacaccctgcagagatggggagagcttccttgttctctaaggacaccctgcagaaatggggagggctgccccgacctctagggacactctgcagaaatggggagggcagccctgtcctctggggacaccctgcagaaatgaggagggctgccccgacctctggggataccctgcagagatggggagggctggcctgtcctctggggacacactgcagaaattgggagagctgccccgacctctggggacactctgcagaaatggggagggcagccctgtcctctggggacactctgcagaaataaggagggctgccccgacctctggggataccctgcagagatggggagggctggcctgtcctctggggacacactgcagaaattgggagagctgccctgtcctttggggataccctgcagaaatggggagggctggcccgacctctggggacacctgcagaaatggggagggctgtccctgacctctggggacaactgaagaaatggggagggctggcctattgttgggctggtccatcttcctgacactgggctccaggccgcctctgctgtggctttatggtccagagcccttcaaccaccagtgtggtgggcgcctgaggcaggtccatgggcagatcctcaggccatctcagcccagtgcagctgacccataatgggaactgggcctctgttcttctctttctggttgtggaactttccagagctctcggagagtctgcttggcgagtagctctaatgctttggaattaaaatcgtagcttattttttccttattggtgtacaattcacttattctttttgtaaatctactgtgttgcacaaccatcaccgcaatgcagttttggaacatgatcagcctgataaagacccctcctgcccatgtgcagtcccccctctgccctgcctcccggcccctggcagcctccagtccactgtctctggatgttgcaagtaagtgcagccagaccctaggttaggcctcagcttttaagcatcctggggcaccaggactggaggaacctggcctggccctggtgggggtccttggcccagcccccaatctgctgctaaccagcatgtggccccattcccttccctgcatttctcaagggcatttgggacaagggcatttgggacagcgagcaaccccaggcctcgggagaattttagcatctttggtgtcttgttcactaaatccagggagccgcagaaaaccctcaccccctcatcccatttctaaaggtctcccgggggtgggatcacctggcagagggcccccctctagccttctgtaatggtgctatgaggctttactcaaagccctcgtgtacatgcgttattttagtgacttctcgctgctgccaggcgatgggtgctgctgtttcccttcttggacagaaggtgagggctggagtagtgggctgagtgatccagcgtctcccagctgggtctgggatgcaggcggtgtcacttcccacactgatctgcgctctcagagaactcctgcctttacggcttcttctgcaagctctgtggggaagcaggaggggccctccctgccgcagctggctgggcctctgtctgggtgggttgaatctggtggggcttgagttggaaagacctggacaggctttgggtgtggcactcttgcttcccagtgtttggcctcaaggaagggacttcatagcttcatgcctcagtctccccatcattcatttattcagcaaatatgtaagtagcccctactccactgggccaggctcggaggtgcaggggtgaacctggcccagcctctgtctccttcatttccagccgcatcagcaaaaaggacctgcagcacctacctcattcgtttgcttgctgcaaaccctgccctctcctgccccttgcctccgtggccagtcgtctgtttccctccagccactcagtcaggtggcctgtgaccaggggaccccagtgctcccacccatcctgttaatccgcaggtatctttgctctagatttacagactggaaatggaagagaaccagctgaagaatgaaatgcaagacgccaaggatcagaacgagctgttagaattcagagtgctagaactcgaagtaagagactctatctgttgtaaactctcaaacggagcagacattctctttgaacccaaactgaaattcatgtaaagctctcagatgttttcaagcatgtgtaaaggggacatgttatagtttctttctttctttctttctttttttttttaaatctgtatgttcagaataatttcactgccttaatgtgttctggagagcgtgctcacccaagtctatggacatgtaccagagctaatatatttattgcctatggcttgttttgcacttaataaaataatttgtttttgcaatattttgccttttttatttgtgtttcatttccataactacttctttcctgcatgcgtagtcaccgggtacgcattctgcacacccagacggaagcactgttgcaattaataacacacctttttaagtgatcttgcatgcagtaaatctcaccttttgaaatagcagagtctgacctgagccagcaattgactctagaatgtgtttaatgccagtttgggcccattttctatttgccaaggtaaacacaaggtaagtaaagacagggtagaaggatgtatttgcataggcgtttaagaaaactagttacgttgttcaaactcttttatccagtaaatacagacccaggcattgcagcaatattggactaaagaaattactatttgcaactcaaactgcacctcaaaactactggagggagatcagttgctgttcacatgtagaaatcctgttccttcaggaactgccccaatgcaccgagtgagattcagtgaaagaatactaatggtcttactgcttccagctgaaatcttacctcgggtgtgttactgtattgccttgctctcatggtacttcataatccttttttttgtttctgttgaaaaatcattggcattttaaacatcacttaagtttgtgatgagtttctctaagcacctgtagtggcgcagctctgctgtctctcagctgaaacctttgcatgcgtgaaaccctcaaagtgagcaccttcacagtgtctgtggcttccccaattttgttttctcctgccggcttgagttacaattctgtctgcattagaactgaccgtgtgtaccttgtcgtgtgggcagggacctgtggcctgagtatttctcacaccaagagtgactcagctcttggctcagcatgacatgagcattttatttgtgcgacagaattggaagttatgtgaggtcattgttaatactcctgccgctgttagagaacctttcacaaatccttgttatgagtctttctcatgagaattctataagcactacccagtttactagagttttctttaatggtctccaccatccttcagaaccaccagaaacaaaatggcttttttttttttttttttttttttaggacagagtctcgctctgtcacccaggctggaggacagtggcgtggtgcactcttggctcactgcaacctctgcctcccgagtgtgagtgattctccggcctcaacctccctagtagctgggatcacaggcacacacctcctcacccagctaatttttgtatttttagtagacacaggtttcgccatgttggccaggctggtctcaaactcctgacctcaagggatccacctgcctcagcctcccaaagtgctgggattacaggtataagctaccatgcccggcctacaaaatgacttttgttcatataaaatctgagttttgggggccactttttctatggggacgccatttaagtaaatttgctggtagaaagtcatctgtggaatggaaccatcatgaaatttgtttttttgcttgttttttttttattttatttttttaaattttggctaataagggaaataaggttttcttactagactgtttcaaacctaggttagtcaggttagggcttcatggaaattgattgaattagtgcccagccctccctctttccttcagtctcaccccagagcatcttcttaagccctgccatctagattcgtgcctctcttggctacatctcttagtagaattattcaagaagcccattggttctgtagctagattctgctagaatggcccaaagcatgttattttttaccttaccgtaactctgctcaaactaaagcagtttgatttaaaggtgtaatttgaaaaggtcttctctgctgccccaccatgacaaatctgtccatcgctaaagtgtttaaagtccattctgtgcaggaaacacatctgagacctgagtcctgttctgccactgtgctttagccctgtaagtaattaggttttcccgaccttttaaaaccttgtcatttatgtatgattaataaatacctcttctgggaaaaggcttgctcttcttcctcccttagtaattaattgagctttgctgtaagtctaaggcaggggtagaatgatcacttgttgtgttagtgtggctcagaaaacaattgtgaatggtattggcagattgtattggaaagaacagaaagtcagcctttggggccgggcgaggtggcttacgcctgtaatcccagcactttgggaggccgaggcgggtggatcacctgaggtctctggagttcaagaccagcctggccaacatggtgaaaccccgtctctactaaaaaagaaacaaaatctaaatacaaaattagcccggtgtggtggcgcgtgcctgtaatcccagctacttgggaggctgaggcaggagaatcacttgaacccgggaggtggaggttgcagtgagccaagattgtgccattgcactccagcctgggcgacaagaacagaacaccctctcaaaaaaaaaaaaaaaaggaaagaaaaagaaagaaagtcagcctttggggtcctggccctgccgcttgctagcgtgggacctcagacacagcctccctgggccaccaccttctctttgtctacagaatgaaagcaatgagcctgcctcctggggtagtgtgaggattagacgggagagtggtgtgcctggcacagagtaataaaccatagttggtggcttttgctgtctattcaaatttagtgcaactgtgttttttaaattttgtaattctgtgatttcctgggttttgatctcacaatggataaagccacggtaccctgttaaccatttctccctagatgaatagggaagaagtaaacacatttccatggagaactgctgcgtgggaaggcgtgaaaacgtcgtagctcacggacgaggctgcttctagtccgaactcgtgctttttagtaacgtctgtgcccactggaattccttggtttttgctgagtaacgtgggaaaatggcaagtggtaaataatccggtcacattctgtttttaaaccgaatcttttccccaggagagagagaggaggtcgccagcatttaacctccaaatcaccaccttccccgagaaccacagcagcgctctccagctgttctgtcaccaggaaggagttaaggtagcgtgcctggggggtgcctctgctgaatgccagccaagggctcgctcagtgcccggctcagctgcaaagggggagtgctgggatagaattgattttcatgagataccccttgtgttgaaagtcacagtttgtccatttattaaagggtcaccaaatgtgactctattttgacccatatgtttaaaacagcagaggcttggtgtatagccctgagtgtgaaccccagttccaccactgctctggcctgtaaactttcagagccttagcctcttcgctatgaaatccaaatgacaatacccacaccgtgaagctggggtgatgacacatcatgaacagactccaagtgcctggccctctgcctggcatgcagcaaggttctgtagatggtggctgtggttgctagaagggcccggggtttaccgtgtcctagagccctgctcagctccagggacagcgtcctgactcacccgcttccatggcctttctagaaagcagtgtttgtgctggtgtaacactcagcaaatgagcagcagttatgccttctctccctcactccccagaggaacggctgggcgcaaaacttggccagaaaagaaaagaaagagcgcggtgtcttgtccagaggaaaggccgtggccctagaaattggtatggttggtctctgtagctcacacaaaaatgaacgttggaaatctcttccaggatgtgaatgtttctgaacttatgaagaaattagatatccttggcgataacggggtaactatgagcgatcggtttctgctttcgtgttcttgttttgatctgggtgtattctgtgtgacttttgttttgttttgtttttaatttctctctgatgtaagagatctaagaagtacaatgtaaggcttttgtatggccgtgttcctgtgtgggtggtggggttggcattcgtcagaagtggggttccgaagttagattcccctggcctgttgagtgaggaggggacgggaaagcctcagaatccctacccagaatgcaggtggagtcacacgagattgctgaaatcagaaagggatctttttgccgtcctgaaagatgagcttgcatgtagccatgtttcacaaaagcttagtgccactctgtgaaatgtccccaaccagagggacaggagctgtctgcctgaggcgctggccccattagcgagagggagctgaccctcgggtgcagctcagagagaagctaggaaagtcgcttggtgttggcggggcatggtggctcacgcctgtaatcccagcactttggaaggctgaggctggcggatcacctgaggtcaggagttcgagaccagcctggccaacatggcgaaaccctgtctctgctaaaaatacaaaaactatccaggtgtggtggtgtgcatcccagctgctgtaatcccagctactcgggaggctgaggcaagagaatcacttgaacccaggaggcagaggttacagtgagccgagatcacaccactgcactcaaacccaggtgacagagagagactccgtctcaaaacaaacaaacataataaaacaaacaacaacaacgaaaaaaaaaaacttgcttggtgctgactgtctgcacgtggatttgggatccagtgtcaaatgcccttgcccatttttgtgttttagaatttgagaaatgaagaacaggttgcaataatccaagctggaactgtgcttgccctgtgtgaaaaggtagaagccagcggcatttctgtgctcacaccttgtcccagcttcccagcaccatacaagaaactgtacattggcgtcttgctttgcgtgggagcatgcgttccagtccgtctgcgtctgcacgtgcacatgcatgcctttccgttctcttcatgacggaagtcccacatgctcactgtagaaaacccagagacgcaggaggaaatcaaaacccggtggaggaaacagtctgtcacttttgtgtatttccttccagtggtttccctgcgtccattgtttttaaacttagttgaaatgatacttgacatccagttttccatcaggctttagaaacatcctccataccatttaacatggttcataaacgtgtttaaatggctgtgcatctctccatcacacagttatactgttagttacttcagcccctcttagctgttatatatttctttctaccatcatgcagtggtaaactgcacattttttacacataaatttctatctacgtcttaaaatatgcccataagatatattttagaagcagaatgactgggccaaatagtaagaatgtcttgaaggactacggcattgtcaaaacagtgtccagaaaagcggcaccagataccctcctacctgcagccttacacgttgttgatttatgcttgacatggcatgttaccgctgaaaagaactttgcccatttgatggtgaaaaccgtatcacgtcattgttttaatttttatttcagtgctagtgatactgagttttttatgtgtattatctattttcttctccttccttgtgaattgtaattgcatttattttgagggttttccattggatttgttcacccatccatccattcattcatttgacaaatatgtattcattgtcattgtctttcttactgacttctctgagtgctttacatattaaaaatactaactttttgacctgtttgttacaaaacacattcctgatttgtttgccttttacactggtttatggtgtgttagaaatatacaactgtttgtggctaaagaccttttcctttcaaagcatatgggttcaactttaaaatgctatttttgcagtgatgaggtcttaatgatcttagttgggattctttccagaattgctggaagggcatttaaaatagaaatagtttccttcccagggcatctgttcaatccctcaatcaagtaaaggatactaaatgttggtaacaagacttatggccaaaccttgcccaaggtcacactggtaggcagtgagaggattggaactcagctttctcctgttcctatcatcactaaacctggctgagcttgtgtcttctggtgaaccgcgggacggggatgactcacacctggccggctggtggctatcaggtgcaggtgcaggcacggggcggggcacatggggcatattcagcaccttcctttccagcagcaaaaccctccgtggctgcctaggctcctccaacagtgctccgtgtagtcacacaaagtgctgattaaacacttatgactcagcttattcaacatctactggaatatttactgagaaagagcatcttagtgtcaagtgctgagcacggccctgggagacgtggagatgtcacatccaccagtgtccgctttgatgtcggggaggcctctcctggcttgcgtcttggctacaccacgtgccagctgcaggggtttcagccggtttctcaccacatctctctcagccatgacactgagcatcctggtggctcacagtgtctgtcggaatccaggaggctgcatatttcagtgggatcaggcattgccatcaggttcaatcaagcacctggggccatgcttgcttcctggagatgcttggtcaatgcctgtggaccgggtgagcaaggagcaggaacctgctggtgactcagggtggctggttcgtcctggggctggggcagggggtgttggagggccagggcgccagctggcaggaggctttcagcctcagtgatagcagccctctgcagggcgctgagttctcccacctgagccgttcctgatgtacccctccccacgcccgacccacagcaggtgttccaggcctgcaccttaggtccccagcgctcctcatcctctgggcatctgtgagattagcagccctctaggacagctgaggaggtggaacctgtctgggatccggccactgtctgccttgaccctcaccatgctctgctcgcctggcagctgcccacctccccgcttgcaccctgcccacccccactgccgcccgcctgcccctgaccaccaacctccccaagctggtcagcctggtgctgtgccttgtgccctacgtgctagagagctgtgccagtcgccctagcctgccaggccctcacaacccctactgacggttatggggccccgattctgagcctggcacagaggtgcccagctccgcgtctttgaggaatagacttaaaccagagttttctcaggttgggttctaggagacactggccctgccatttgtctgtggataaaggtccagtaagcttgggtgttgccgctcgtctcctcccagcttggagaggatgttggtgtaagagctcctcaggtccagaagtggaccttcatgtggggtgggaactgcatcagcaggaccccctgagaacctggcaggaccactaggggactgacagtctgctttgcctgggactgacagctttcctgggacgtgagaattgcagtgctaaaacagggacagtcgtgggccaacagggacaagctggtcaccctagagccgacaggcactgcagggaagtttgcaaagggggtgagcacctgcaatgtcactgccagggaaggcttgctgacaggccccagttaacccctgctccactaaatactctttattttaaaaattgtcattccatacgggtatccgaataagtggaagtcaatgtcaatgttcccttagaggcattaatttttttttttgagacagagtctcactctgtcacccaggctggagtgcagtggcacgatctcagcttactgcaacctccacctcccaggttcaagtgattctcgtgcttcagcctcctgcagctgggattataggcatatgccgccacgtccggctaatttttgtatttttagtagagacgggtttctccatgttggttaggctggtctcaaactcctgacctcaagtgatctacccgccttggcctcccaaagtgctgggattacaggtatgagacacctcacccagcctcgaagccagtttcttagtgtgtaggtgaagtgcaacctgaaggaatgtcctatgatgtgcctgtgttgatttcgctacaaacagcatcttgccctgggcacatgctttcctcatctccgcccactgaggccctgcccagtcatcaggacacaggcatccgtcctggcacccatcagccccactctggttagccacgtataggatcaggcaaggtctcactcacctcggcacatggcacgtgccccacagagaacctgaaccatgagacattggagggtttataaatcatagcagtcatatctcttctccctcaagttcaaagtggatcgagaaaaagacaccggcctcagccaggtgggaatgtcttaaaggccatgttctcactagtaacgatggataggagaatgaggcataggtctgagccatagtctgactttctaatagttggccgtgagtcgaagccttgggaccatccccaaagggagggaggagagatgagccccaccagttgcaggggatccaggctctgcacctgaggggccctgggaggcggggcgcggagagcagcccccaccctgcagcatgctgcccccatgaggctgctcagttcatcagcacctccctgtgagtggactcacttctcctccccagcctgagaccccctctcctggggttggagcagaaccatgaacgctgtttctcccaggagtgactgagcctccacagctatctggccaaactctttgatattaaatttctgatctcacgtggtcgggggtcctcatggccagctctctctgctttcatgttctctccccgttgctaaaaggtcttgttgaatttattttttatatgcaattttttaaacgacagcagcaacaaatctcaacactgtgttctgcagaaaccgttctgagagcagcatgttgtaatcatccaaacctggatttcccattttaattttattcattttatgactgcttgcatgaggatattaaaactgaaatacctgtaactccccatccaaaatatgcttatctgtttctaagaaaccacgcatcttgtctgagccttgtttgaggaagtgctggccaccgcggctggcacagggtgctgggtgctgccaccgtggctggcacagagcccgtactgggggccgagctcactgtggcgttagggaaggagttctgtggcaggagccgatcagttctagtcccctctgttcaggcagcacacaccccaccaacctgcacagccttgattctccttcattcgacagaagtttattaggcacctgcttgtgtcaagccctgtgccaggcaaggaagtccaacaggaggcaaatgtggtccccaccttcaaggggggcagcggggtgaggggtgaaacagacaacagcgctgtcaggtgagtgctacgacccggcattcacaagatgactgacatgggcaccatggaggttagctgaccccacggactcaagcagggtaggcttcctggaggaggtgacagctagctcagggcctgaagactgagtgatgctagcttgttaaaggcctggggctgaggctggggccaggagaggtagggacagcacatggaaaggctgggcatgttcgaggagctctgtgtagttaggatgaccagggcctgggatttcagtggggacaggagagtgctgactgatgaggctgtgagcatcacaggggccaccccacactggggccttgccagtgttgtcgggggtgctgggatgtctttggaggtctctgagcagaacagggatgttccatgagcccatgtgtgttttttagggaacttgctggctgggggggcagaaaggaatttggggtgtgtggggaggattcagatatgaacctgggggctgaaaggggaatggggggttggtgatggggagggagtgctgcgggtgggtttgagaaccagaaggaggcaaagccaatatgttggaagtggacggaaggaaggagggggcactcttccccatcaggggtcctggcaggccctggagatgccttgaggcttgggagtggaggggtgcaggaggcagcggcacacagggcgtggtggggcagatctgggtatgagacatttcagagagggtagggagggtggatcccgggggagggcagagtaaggtggagaaggccgagggcagggctccaggacctcacgagtgcggggtgacctggcgagggtgaccagctgccgccagaggagagggaaagcaaggagtacaaggaagctgggggagcctggggtcgggaaagggggctttctgcagccaaggcctggagtcaggaaagggggtgctccacagccgggatctggtggcaggaaaagcactctacagcggggcctggggtcgggaaagagggcgctccgcagctggggcctggcagtgggaggccatccgacagccttagcaatgaggaggtcaatggtgttgtcaaacccggacacccctaggtgccctgatctccccacagccctcccccacagggcagccaccctgtgctggcctggacttcctcccgttttaggggctcctcgtagaggcacatccacgtatgacacctgcctccgtgctcacccccagcccagaccccagagggaacgtggacagagctcccactcccttacctgccgctcaggtgcacgccccgcctgttcaccccgtactctccgtgcctgcgccctcatgtcctggcatgaaccctgctttcatgctcctacaccccctaccctgtgtgtgattccacctcctctcatggtggcaccaggcactctgggctgctccaactcacgttgctggagggatgagggcagtggctttggcatcctgcaggctgggttccaaatctccattctgcacccgtgtgaccttggacaagttacttaactcagcctccatgtctttacctgcaaaataggggtgacgctgcctactgcttggggtggtcgtaagagagtcagatgaggtctcctgtgtgaagcatcagcacagagcaggcactcattgacatcagctataccacaccacttcctctgctgcacacactcgcagccgcccacactcgggtccatccaggctctgaatccagcttccacaccacgtacatgtcacactcacacctaagacctcctgcacatgcaggctggaccatgcacacacaaccacgccatccacagatcaggcatgtgtgtgccatgacctgacccattcctgagcacactctgaggaagccgatctatgaaattcacacacctgtgaaattccacagccccttgggttctgactctcactttgctgcacccgtcctgtccctgctgttttctagtggctgaagcaaatagaggggaccgaggccgccctgacccagaagatgctggacctggagaaggagaaggtaaaagatttgactgcctgggggtgggggagagggttcaaagagctcagagaggttgatttgcaggaaggctttgcatgtgttttcctaatgatttgcatgcatttctcaattttgcttttgccccagtggttgttctaagtaattgtcacccatttacttactctttcactcgctcaattactcatcgaatacatattttcagagcctctgctgtgtcccaggtgctatggcaggattagaggcttagtaatgaataagtggggtccctgccaccaggagcaagctcacagacctgcagggtcatgcgttcatgagctcacgtgaatgcagcatgaggatgttaggagagacacagcccagatatggaaatgctggcgcagtgactctaggaacacatgggcatggctcaaatctttgctggccatgaaaacttgggaaactggactttagttttctcattgatgaatgggaaattccagtctgtgctttgctgggttgtgggatgagaaatgctacatacataaccagggttgcactgtgcttggcaccttgggtacctgacaaatggtggtggtggttattcactgggactatggatgtatggggagcctggggaggacagagaaggcttcccagaagacgtggttcttgagtagtcaaaggccaattcgagttctccaaggagaaatggaaatgggaggagaaggaggaaggtggaaggactagtgtggcctaggagcagggtgtggtgtggcaagagccctgactgatgccagaaggcctgggtttctactcccacctctgccatcactgaactgtggcatctaaggcaaggctctggtcctccctggctctttccttccttgtctataaaaggaagtggctacaggagatgaattctaaccctgaaaccctcaaatcagtcataaaaagagatttgcactccggagagatcatgcttgcagggtcttagacagtgacccaggtatgtgggaggcagggagaagtgtgctcagtgagaccaatcgggaggtgggtgatgcaattcaggcaggaaggaagagccacatctgggaaccatgaagacagtcttcaggggccactaggatgtagcaggaggaacctagaaggactcctgtgacttgcgccttggtttgaggtgggtcccttctttacagtcaggtacccaagaggcagggaagcaggaggaatgggatagtcttcaccaaggatccaggtgtggctgtcaagggtgccccaggtcagtgaggctcctgctgggtgattcatgtgggggcaaacggggaagaccaccaagtcccttctcatctgagtgcccccaattcggtgagactgccactctctagcaaacgggctctgaagctgtcatggattcctgttctgacgctggtccctgatggcgcctccctctttctcaggacctgttcagcaggcagaagggctacctggaagaggagctcgactaccggaagcaagcccttgaccaggcttacctggtaggaccagaagtgggtttgacactttggcttcttagactccacattagaggctgctttttcctctggggctgaaactgcatttagggcgctccccagtgccaaacaggagtgataaaaatgccatctccaccttgtgactggaatgaccgtacagactgtccctttttccaaatcaatcgtgattttcaaaaatattcaaagttactttaatggttttcttagacatgcttcttaaattctagtaatcatttgagatgaatgagaagaaactatatttcttttatgtttgattttacttaaatatttagacttaaagtcccaaagcaagttttcctataaataggaaaaagagatgatcacaaaggaacgcagaggtaaagcaattagatgaagccaggtgattttcagaaccgaagggacgaggtataaggtcggatgtaatactgcatttgggttgcaaaattgattctgggcgtcctggtgattaaaatacagtgggatgatgttcaaactcctgtgtcctcacactcaaagctaagtgctcctggcacgagagaaattctccttcggggtggaggggagttgagtaagatcatagaaacttgtcgctgcaggagagagaatttagagttcaatgtcattccttgtaggaagaagctagcgtggtacagagtcttgagcaaatctctgcccagatcatttgtagttaaaataattttacaaaaatgggtttgcacctacaaaatgcagagccaatcactaaaaaaaaaatgactttaaaactctacttcccatgacaggctccaggaagacagagagcaggtagcatgggcttagctcaaatggacaggagatttagacatgaaggccggtgcaactagctatgacccttgtcccttcctgtcgaggctgtgaggcttgaatcccttgagactaggagcaggagatgtagaagatcagaatgaactaaaccttatcaagacacagcatttccctctgggctatcgtttctggttacacgacatttcagtagtgttgagggcaactaacgaatggagacattctccattcgtgttttggtccaggcttggtgcttttgaaaacaccctgcaggctgggccatccccgtcatgcatccctgttcttccctagtgttttccaaaaaaactccaaggaatgtgattttagatggaacttagggtcccgcaaagcgtagcgcaataaagttggaaaactctgaaggacttcttggggtcttagcgtgctaaagggtgagttgaggctccgagaggaatgtaagcaagtggtgtgccaagttcagtgaatcactggaccttttttcaagggacatcttgcagaactggcatttcccaaaacacacttcggaacaccttggggtccacccttcctttgtctaagcaccaactcaggaaggcctgaggggcccctaagaatgctgaatctgcagaagaggcccctgcatgctggttctgccaccatacagaagctaccttcacacttggagtgtttgaaagcctgccatgggcactgtgctcccagtgggatttcagttgcatgggtagacaggagttctgacgcagcccctggattctcatgaacagtcaggaagtgaaatgctctgagagggtgacagggccatgtgtccatgctggggccaggacagcagatgccagatgcaagcctgtgtccctttgtcactgagctgagtgaggcggggcaggcccacaacgggatttccagaatcgagtggtgcgtttctatctggaaactggccacgcaggggtctcctgggagctcggctgctgagtagagaaggggtgagcctgcaggcaccagcaagctctgctccatgtggagcccacctgggggccccgcagctctgccagggaacagattccagccttctagttccccaagggcaactgttggggtgggtagagctgaaggtgatcatgtttgttggttaaaatcagtctggcctgatgggcctggatcccagcagggagaagccagaggagacttgaagagcaagtggcctgatggtgacggagggctactgggttagcctcttcctcggtgatggagggataccggttagcctctgcctcagtgatggagggctactgggttaacctctgcctcagtgatggagggataccggttagcctctgcctcggtgatggagggctactgggttagcctttacctcggtgacagagggctattgggttagcctctgcctcagtgacggagggctactgggttaacctctgcctcagtgatggagggctactgggttaacctctgcctcggtgatggagggataccggttagcctctgcctcggtgttggagggctactgggttaacctctgcctcggtgatggagggctactggttagcctctgcctcggtgatggagggctactgggttaacctctgactcagtgatggagggataccggttagcctctgcctcagtgatggagggctactgggttaacctctgcctcagtgatggagggctactgggttaacctctgcctcggtgatggagggatactggttagcctctgccttggtgttggagggctactgggttaacctctgcctcagtgatggagggctactggttagcctctgcctcggtgatggagggctactgggttaacctctgactcagtgatggagggataccggttagcctctgcctcagggatggagggctactgggttaacctctgcctcagtgatggagggatactggttagcctctgcctcggtgatggagggctaccggttagcctctgcctcggtgatggagggctactgggttaacctctgactcagtgatggagggctaccagttagcctctgcctcggtgatggagggctactgggttaacctctgactcagtgatggagggctaccggttagcctctgcctcggtgatggagggctactgggttaacctctgcctcggtgatggagggataccggttagcctctgcctcggtgatggagggctactgggttatcctctgcctcggtgatggagggataccggttagcctctgcctcggtgttggagggctactgggttaacctctgactcagtgatggagggataccggttagcctctgcctcagtgatggagggctactgggttaacctctgcctcagtgatggagggctactgggttaacctctgcctcggtgatggagggatactggttagcctctgcctcggtgatggagggctactgggttaacctctgcctcggtgatggagggatactggttagcctctgccttggtgttggagggctactgggttaacctctgactcagtgatggagggataccggttagcctctgcctcagtgatggagggctactgggttaacctctgcctcggtgatggagggctactggttagcctctgcctcggtgatggagggctactgggttaacctctgactcagtgatggagggataccggttagcctctgcctcagtgatggagggctactgggttaacctctgactcagtgatggagggataccggttagcctctgcctcagtgatggagggctactgggttaacctctgcctcagtgatggagggatactggttagcctctgcctcggtgatggagggataccggttagcctctacctcggtgatggagggctaatggttaacctctgcctcagtaccatgtttctattgaaactcatggtttctctataccacctgtagtttctttgggagagaagtagctgctccttagtaaggaatgtgggtggagatttaggaaggcagaaaaggaggtaattgtcttttgtccttagacattgccataagatagctacatttaagtgtcttgctgtgaaaacgagtaacatcctgtaatgatgacaactcagctttcacaaggatccccagttggtcactaatgcctcattcagctttgccaaaaagggtggcttgcttttgttgggggttaggggcaattaaaacattgccactatttgctttgggctagagttgcattcttaaggcagctgaaaaccaaatgtgtgcaaatccagacatatttccccattggcacccattagaaaaggggagatttgtttccagggtgaggagagccaattggaaaccaaggatggaataaaacccaggtgaattgcacctctgtttgagtcatgcatcttaagggaatgctatgattactttttcttcttgcctttgtcccctcttgtgcatagtaggggcatctgggttgaatagagtaaaaaatgacaagtgtgcggggccgagttgctccctcacagcctgctcccccgggcactgctggccctgtgcttggcccctgccagttgcccctccctgcccgaaacccccctccctggctctgcctccactggcagcagccttctggtggttcctgtccacctccttgtgaccttcctctgtctgtgtgatctggggtcctcagaaaatccaagacctggaggccacactgtacacagcgctgcagcaggagccggggcggagggccggtgaggcgctgagcgagggccagcgggaggacctgcaggctgctgtggaaaaggtgcgcaggcagatcctcaggcagagccgcgagttcgacagccagatcctgcgggagcgcatggagctgctgcagcaggcccagcaggtaggcggcaacagcggctgtgcccacagcaccccggcacccttgttgtcctgtgtgcaccttggcaccctgatgggcctctgagtgccccaggctcattccagggagagttggtggtaaagcaagtttccaagaagcaagatttcatagatgcccatcatatctccccgtgacggggcaagacgtggggcacttgggcattctaaagagcaaacgctgaaacattcatccaaaccaaagtgccttctccctcggccctccttctccagcatctgcacgctgtttccaggtcagatgctggttacggggaggcatccgctgaatggtttgcttttttgctaccttttgtgatggcggctcattggagcattgggcctagaagctgtaccagttgtaggtctgaaaacctcaatgtcttccaaggttcgatgttgcgtgtgagtttcatgtgctactgagcacatggggagctgagggcttcatgactcctgattgacgaggaagggaaagaagcagcagcatcatgcagagcatttgtcgggcgctcaccatgtgtcgggcagtggctccctgcgctgcagatcctttatctcatggaccctatgggtaggcactatgacgtccattttccagacgagagaactgaggctcagggaggttaactcatgtgtctgaaggtcacccagatagtaaggatctagattaccagtggggagggatgtcacagaaggaaaaaagaagggggatgcgggcagagagagagagaaagagaaagagagagagagagagaaagaggttgacttactttaaggaactgcctcacgcaactgtagataaagatcggcaagttcacaatctggagggcaggctagagccccagggaagagttgttgtatttcaagcctgaaggccatctgctagcagcatgctcctctcctcggggagctcagtctttttctcaaggccttcaggtgattgaatgaaccacacacacacattatggaggctcatctgctttactcaaagtctactgatttaggtgtttatctcatctaagaaagacctccacagaaacatctagtttgtttgtttgtttgttttttgaaatggagtctcactttatcacccaggctggagtgtagtgggacgatctcagctccctgcaacctctgcctcccaggtcaagcaattctcttgcctcagccacctgagtagctgagattataggcacccgccaccacacccagctaatttttgtattcttagtagagacggcgtttctccatgttggccaggctggtctcaaactcctgacctcaagtgatccacccacctaggcctcccaaagtgctgtgattataagagtgagccaccgtgcccatcaacatctagaatatttgaccaaatatctgggtaccatggcctagccaagttaacataaaatcaatcatcatcaccatcaaagggaaagggcattctgggcagcagagcagcatggtgtggttcagcttaggcagcaaagaagctgaaaacacagacactgggaccagacggccgggctctgaactctggatcccccatttagttgtgtggccttggacaaattatttaacctctctgggcctcactgtcttcctcatggggatgatgacaatgcctgtctcactggggcatggtaaggtttagataattattacttgtaaactgctgtcaataagtgcagaccactatggattcaaaagtagtaccctgtatataggattttacagagaaaccaccaccctggaacagtggttgtaatgagcctcactaaaacacctgtttgaaaacaggtgtttggctacctgattaagtcttcaaaccagcttaaacagagggagagatgaaggcacagagacaaaacagctggatgaaggtcagctagccacaaagtgacccttccaggccaggcccatcctgagtccactgccagagccctggtctccacactgcatgatcccctgagggttaactattgatgttttgtgattctttgctagttgctatcatttgatagtctccagaaatctggtattttcaaaagagtattgcaaaacctacatttttttttcccaaagagaaggaattcaaacctgcattacagtgatttttttcccctccaggaacataaaaattaacgttttaaagtttatatatggaaagctatgatgcagcattaggagccataggctctcgggtcagacaggtttttattcaaatcctgcccctagttatggtgtgacctgaggcaagttagttcacctccgtgagcctcaattttcttgtctgtagaatgggtacaatcaacacacacaacttgaagtgttgcggtcaatggagaatttatctaaagtgctcacaaagtaagcactcaatgaatattagctaacatttgctgcacttggcttttctaacccaacctaatcattatcatgtcttctctcacctttatattcatcataatccctaacactcatgtattcaacacgggcgacactacctaacacaaccaggtgctctggcaacactcaccccacttctgatctggcccaagcactagctacccgcttcaaccatggacagaccctcccagtctcccagtttgctgtggacattaccattgtatttcacctggaatctggcccacagggtgcagtgatgtcccctgcccagccccagctgaaattggcattttccagccctgttaactaagaggagaagaggatgtgaaaacatccattagtgaatggcacctttcccagcggaatgattctgcacttttgtaaaaggttctgcctgagtgaaggttggagtgaagccactggtgtaaattcactttgtcctgaccctctctgagggttcagtagcactggtttcgcttcctagccacagttggcctgcagagacatctgctgggacaattcacgatggcaatgccctctccattgtctctttctctgccgaagccttcctaacacagagcaccaccacagcacccccgcctcccgctgagaccctcactggctccctggtgcccagagtacaaagtctgggttgcttagtctgaccttcgaagccctctagagccccttccaactgccacagctgcattgtccacctctctcagagttgcccctgctggccgtcatggagctgtgttttgctttgttttgttttgttttgttttgttttgttttgtttgtgttgtgttgttctaacattcgtgtaccaagcactgttctaggtgctgtggcaatattccagcccagggaggcagactggggctgacccacagaaggggctcagtggacattggttgaatgaaactcacacgagtcctttgaggacaggtcattgatgccatttttcacaggggagcagagtgaggctcagagaaggtaagcaacttgtccaaggtcacacagccaggaagcaacagagctcaactgtgaacccaggtcatcagatgaggaaactcttacccactgctctttctggcctcccacactctgatgagagactgtttcctaagcgtgaatatcaagaaagatcagaatgagaaccaggttgtcaggctgatttttaaagcccagaagttgttcctgggggattctcagatgttctttggaagctgtaaagccagacattagattacaaagcattgtcctgcagatcccatttcaccctcggtgtcatggggtcccacacagacattacagcagaggggtccagacacagagagatcatgtcactcacccagagcccaacagctgctacatttggggcccagaattcaagccgggttcaggccacatgccctgcttactcagcagcactcggccgccctgcatgtgagggggttgccaggaaactcctgccactaccagactgaggtcacacagttcccttcgggtgggagagagtagaaaattatcagtttaaaaaaataacatatggagtgctcaatgccaagctctgctctaaacacttggtacaaatttgcttgttaaatccttagatgtgggcagcacccatctatagataaggacaccaagcctcagggaggcagaataactgcccaaggtcacagatctgagagaatcatctttttttctgtctccttcgtggaatccattctgtttggctgccccgtgatcatcctgaaatcaaaagctcatcatttccctgcttagaacccgtcactggctccccatggcaaccccaaagctgtgagcacctcatcgggacatgggccattccagaccctctgagctctgtccccgaccccccaccaaaggcctcttggcctcctgcacatgccgttccctctgcctggaattcctttcccctcttgtgcatctggtgaactaaccctgctgggttccacgtctcctccagcccacggcacgatacctcacccctcctcatgcctctttatttatttattgagatggagtctctctgtgtcacccaggctggagtgcaatggcgcgatctcagctcaccgcaacctccacctcccaggttcaagcaattctcctgtctcagcctccctacaggagcgcaccaccaagcccggctcatttttgtatttttagtagagacatttcaccatgttggtcaggctggtcttgaactcctgacctccggtgatccacctgcctcggcctccaaaagtgctgggattacaggcttgagccaccgtgcccagcccctcttggttttcttgatggtgtttgtattcatctgatgccccttctatttatgtgtatgctgctattgtctgaacggtaattgaactataaggggagggactttgtctttctctccaggactggaacaggcccaggcatatggagtcctatttactgagtgactaaatgtgcccacagtggtggttctcaaagcaggggccccggaccgtctgcgtcctcatcacctgggagcatgctggagtgcaactttcactcaggtcccaccccagctgggctgaggcagaagctctgtgggcagggcctggcaatctgcatttgagtaggctctctgggtgatgctgacacaggctggagaatcactgccctacggaatgtgagatggcttctctgggcctgaataaaggcctatggtgaccccatgtttaatttttgctggctgaaatcgtccacccttccgcctcccagcattgtctcattgtatgaggtctctatcccgttcagggcagacaagggccagcagcccgctgggcagagttgccccaggggtacccaccttggtggggcccttgatggggcggaagccctgtgagcacatgaagatctggaaacgggggagttcaccagattccctcggtggagacgctgtgtgggatgggaaggaatgatcggtaaaccacccagggaattaattctgcaggtgcggtgccaaggagggtaactaagagtctgggtttgcccaggactgaggggtttcctgaggctcacaccaggaaagtcctgggcaaaccgggtctgtcggtcaccctggtaccacgtgctgagtggggttctaagagggcagggcggatgctggtgcagtggctcccaccagcattgacctcctctgcccttctccctccctccccccatcccccaggctgcagttaaacaaatcttagacaagtacgtgatgtggtgtcacatcccacccatgacctttattagctgctcagggtgcctacatgttttggtccagtctcgatgttttgtttttaaaagatcccctcttaagaatgtgtactgtgtaattctatttccagaaacttctagaacaggcacgatccattattagtgatagaagtcagaacagaattcctttgcagagctggaattgagccgggggaccaaggcctcctgggagctgggatgctctctgtcttgctttgggcggtggtgacatgggcttgtgcatgtatcagagctcatcaggctgcccacagtgttggtatcctttacagcttctgtgctagaccacaataaaaaataaaaacagagtttttaaacctggaaaacttactttttctgacacgtaacctggtgtatttcagagaatccgagaactggaggacaaactggagtttcagaagcggcacctgaaagaactggaggaaaaggtaggtgactgcagctcagactgtccccaggtttctttccatgaaatgttagtgcggaatcattttatttcataaggtccaaagcatagactctgtctccagccctcctttctctgcccttcttcccctaaatcagcatctcatggaaatcgctagttcctcaaaattcctttctggtaaaggcatttccttctcaatggctgtcaaaaattcttcaggccggggccaactctgtgtgtctttttcacaaaagactttcccctgaatccctcccctgctgtctcactaggaaagaggtgaagcacattagcccgatgaggtcagtggcatccccctaaccacagacacaggttctcctccatggactcattcactttttaaataccttctatgagccccagaccagtcgcatgttcctggaagacgcagcctctcccatcccagaagacgtgaggctggcctctcaatgggctttgggtatgttccaccagcccatttaccatgatgcccattttatgagtgaggaaagtgaggcagagatagattaggacacctgtccatggtcccacagctaggaagggatggctgggttctccatggatgtcatagccatcccatcctgcccctccatatgacattggtccaggcagacacatgagtctggctcaggacacacacaaagcagttttatcatggtattgcccttcatcttcttccaccggatggctgtgagtccttgaggacagggaccacgtggtgtgcatctcttcattcaagacagttcttgccacaggatagggtatcatcaaatgtttgtggatgagtacgcaaatgattctagatgagtacagaaaaacaataattgcctatttaatgtcacagaggtaagttcaagtgtggcaacaagatggagagccgctgaacccatccaggaggtccgtggccggcatgcctgtgctcgaagagggggtcccacctgaatctcaaaggacactgtgggatcagccctgggaagaggaggtagaaggggcatctctgggctttatgtgtctgaggccggtcttgtgagagaggaagctgacttatttcagggacaaaccagggcagaaatctctggaaggcagattccagggctgtccaaaaatgggatgacagcctttccagtccagtagggaatcaaaccatgtgcccagagagatgggacagcacttaagattccacctccgtttcagatgcttcctctcccttctctcatgacagtcggctccatgcagatgaaatcaccttcccatctctgctggaggtgtagggccctgccgggtcgcaagtggaccgaggatctgtgcgcaggggcgggggcagggcttgcctgccagttcccttgttgctctcatgggaaccccagttttagctgattcctagagtccccgtctgccagatgcccacgcctaccagcctcccaaggatattctgagaacccaagggggtctcaagtataattggatttaagaattgcttgagggatgagctggtttcgcagatagatgagcctgggctctcctctggccttgcccaggtaggcccagagagcctgggaaattcacccctctgccccacggaattcacccctctgcctcaggccttggtgttctcatgtgctgctaggaatggtgctctgtctctgagggtggatgtagggataaaatgaggttggggatatgaaagttcgcagcccagggcccaggcaaggcgtgtggactggcagcaccggttcttcccatctcccaggtagctctaccacttgtgttggtaaaatgagtcacagagccagatatgataaaagaaaggcttaaaacatgcccaaggtcatccttgctgattaaaatgttaaaagtcaggtggaatgagcgcacacttaaaataacactcactatgtcctcggcagtgagaatacctgggaaatgttggaatcgtctttctggctcttttttcgactcttttctcaaagcctatgtttggggactggtctgtctccttttgccacagaagggagttgcggaagctggcatgcagagcaggaggaactggccaggatggatgcctgacgaggcctgtagggctggaaaccttccaagatgcctcatgccaccttcatttccttacaggcatcggggcctgtgaccgtggaaatagctccagccaccactatccctggccccttggtcccttcgtcattgccagaaactctttcctgccacacccccactggatggtcttaacgaatccttccctcttcccaggcctcagtttccccatgtggaagatgaagggctgggtgactttcaaggccccttctagctctgacttccaatgatcctacacctcgtttagaagttgatggctgttagtttggacttttccaataaataatatagggagatattaccttgttttgggggggagaagaactcaaggattattttcaaaagccccagttgatgttcagatatgtttcccctaatgacttgcaactccttttgaacaaagcaagtcctgagaagggtaagaaaaaaattctacttttgagtcggtgtgtttaatttttcctcccgttaagaccgtctttccctgattttttttttctctgtataagtagactaatcaaatggcacaaaagattttaaatagcgactctcttggaagaaagaaccctggtaaagatggtgtagggctggggtgcccaatcctttgacttccctgggccacattggaagaattgtcttgggccacacataaattacactaacactaacaatagctggtgagctaaaaaaaaaaaaaaaaaaaaatgcaaagaaatttcataatgttttaagaaagtttacatttgtgtcgggccacattcaaagctgccgtgggccacatggggcctgtgggtagagggttgggcaagcgtggtgtaggcagaagggctctacttgtctgcaagttggactgggtgaccttgagtggaatttaccctgatcttcggtgcacacatcacgcccccgtctcttggtgggagccgctgaccatgaccatcggctgggccttcctctatttataccggcctgcccaagttctgcatgaaggccacatcacagcaccaaaaagtcctgtcccggtccagagtgtcaatctcccctgaatgagttagctgcatgtttggagagtgggtcgggataacccaccctgagtgtggaagaccccaggatgcgtttcccaggggagatcacttcctaaagcctgtttacttcccatttctctttccgaacccaacaactcagtgtcctagttcttgtaaaatgctgtcattgagttccatactacatatcttacatctgttttcttttctttttcttctcttttcctcattttcttttggtattattttatagtttttgttcctttttttgtttttctcactagcattcattctgtggccttgatgacttcagtgagccaagaactcgggttggtatcctttccttttcgcagatgaaaatgatgattttctaaaacaggaggagtcctcccagtccctgactgtcaagttccttgagagatgaggcaccgtggaaggtggccttgtgctggatgctttaactcatgggtctgggtcatggggggagacccgccctgaggagggggatcagggacgctcactgtgaataagaaactcctctgtggagtttcatccacaaagggggactgtgttttattccaaaggttctctccagtctggcttcagtccctggtgctctctgttgctgt

SEQ ID NO: 958 - DNA, 2358 bp, Homo sapiens
gtgtggaccgcaggatctcagcactctgacccaaggggaagcatgtcgaagaaaggccggagcaagggcgagaagcccgagatggagacggacgcggtgcagatggccaacgaggagctgcgggccaagctgaccagcattcagatcgagttccagcaggaaaaaagcaaggtgggcaaactgcgcgagcggctgcaggaggcgaagctggagcgcgagcaggagcagcgacggcacacggcctacatttcggagctcaaggccaagctgcatgaggagaagaccaaggagctgcaggcgctgcgcgaggggctcatccggcagcacgagcaggaggcggcgcgcaccgccaagatcaaggagggcgagctgcagcggctgcaggccacgctgaacgtgctgcgcgacggcgcggccgacaaggtcaagacggcgctgctgaccgaggcgcgcgaggaggcgcgcagggccttcgatggagagcgcctgcggctgcagcaggagatcctggagctcaaggcagcgcgcaagcaggcagaggaggcgctcagtaactgcatgcaggctgacaagaccaaggcagccgacctgcgtgccgcctaccaggcgcaccaagacgaggtgcaccgcatcaagcgcgagtgcgagcgcgacatccgcaggctgatggatgagatcaaagggaaagaccgtgtgattctggccttggagaaggaacttggcgtgcaggctgggcagacccagaagctgcttctgcagaaagaggctttggatgagcagctggttcaggtcaaggaggccgagcggcaccacagtagtccaaagagagagctcccgcccgggatcggggacatggtggagctcatgggcgtccaggatcaacatatggacgagcgagatgtgaggcgatttcaactaaaaattgctgaactgaattcagtgatacggaagctggaagacagaaatacgctgttggcagatgagaggaatgaactgctgaaacgctcacgagagaccgaggttcagctgaagcccctggtggagaagaacaagcggatgaacaagaagaatgaggatctgttgcagagtatccagaggatggaggagaaaatcaagaacctcacgcgggaaaacgtggaaatgaaagaaaagctgtcagcgcaggcgtctctgaagcggcatacctccttgaatgacctcagcctgacgagggatgagcaggagatcgagttcctgaggctgcaggtgctggagcagcagcacgtcattgacgacctctcactggagagagaacggctgttgcgctccaaaaggcatcgagggaaaagtctgaaaccgcccaagaagcatgttgtggagacattttttggatttgatgaggagtctgtggactcagaaacgttgtccgaaacatcctacaacacagacaggacagacaggaccccagccacgcccgaagaagacttggacgatgccacagcccgagaggaggctgacctgcgcttctgccagctgacccgggagtaccaggccctgcaacgcgcctacgccctgctccaggagcaggtgggaggcacgctggacgctgagagggaggcccggactcgggagcagctacaagctgatctgctgaggtgtcaggccaaaatcgaagatttggagaagttactggttgagaagggacagatttacagactggaaatggaagagaaccagctgaagaatgaaatgcaagacgccaaggatcagaacgagctgttagaattcagagtgctagaactcgaagagagagagaggaggtcgccagcatttaacctccaaatcaccaccttccccgagaaccacagcagcgctctccagctgttctgtcaccaggaaggagttaaggatgtgaatgtttctgaacttatgaagaaattagatatccttggcgataacgggaatttgagaaatgaagaacaggttgcaataatccaagctggaactgtgcttgccctgtgtgaaaagtggctgaagcaaatagaggggaccgaggccgccctgacccagaagatgctggacctggagaaggagaaggacctgttcagcaggcagaagggctacctggaagaggagctcgactaccggaagcaagcccttgaccaggcttacctgaaaatccaagacctggaggccacactgtacacagcgctgcagcaggagccggggcggagggccggtgaggcgctgagcgagggccagcgggaggacctgcaggctgctgtggaaaaggtgcgcaggcagatcctcaggcagagccgcgagttcgacagccagatcctgcgggagcgcatggagctgctgcagcaggcccagcag

SEQ ID NO: 959 - protein, 768 aa, Homo sapiens
MSKKGRSKGEKPEMDAVQMANEELRAKLTSIQIEFQQEKSKVGKLRERLQEAKLEREQEQRRHTAYISELKAKLHEEKTKELQALREGLIRQHEQEAARTAKIKEGELQRLQATLNVLRDGAADKVKTALLTEAREEARRAFDGERLRLQQEILKAARKQAEEALSNCMQADKTKAADLRAAYQAHQDEVHRIKRECERDIRRLMDEIKGKDRVILALEKELGVQAGQTQKLLLQKEALDEQLVQVKEAERHHSSPKRELPPGIGDMVELMGVQDQHMDERDVRRFQLKIAELNSVIRKLEDRNTLLADERNELLKRSRETEVQLKPLVEKNKRMNKKNEDLLQSIQRMEEKIKNLTRENVEMKEKLSAQASLKRHTSLNDLSLTRDEQEIEFLRLQVLEQQHVIDDLSLERERLLRSKRHRGKSLKPPKKHVVETFFGFDEESVDSETLSETSYNTDRTDRTPATPEEDLDDATAREEADLRFCQLTREYQALQRAYALLQEQVGGTLDAEREARTREQLQADLLRCQAKIEDLEKLLVEKGQIYRLEMEENQLKNEMQDAKDQNELLEFRVLELEERERRSPAFNLQITTFPENHSSALQLFCHQEGVKDVNVSELMKKLDILGDNGNLRNEEQVAIIQAGTVLALCEKWLKQIEGTEAALTQKMLDLEKEKDLFSRQKGYLEEELDYRKQALDQAYLKIQDLEATLYTALQQEPGRRAGEALSEGQREDLQAAVEKVRRQILRQSREFDSQILRERMELLQQAQQ

SEQ ID NO: 960 - DNA, 35998 bp, Mus musculus
ttaactaatatacagttgccacaaaacccaacgtagtcatggaacatctctgtgctctaacaattccctcgtgtctgtctctatgttgtctatctctagcctgtggcaaccacttatctattttctgtccctgtggtttaagccttgtcccacgtggcatggcaatgggaccataacaaggctctcttagcatcctcacatagccagtttgtgcccagcccattcattcagagcacggaccattgcctgacaataagttattttcattatctacttgatttctctttcatttgagtgtccacttgcactaggaagtgagacagggatttttgcctgtctgctaccgattctccaaggttcacgaagcaacctaagtgttcagtaaatatttgttggatgacacgctatgtgaatgaagagattggggaatcctgggaccctcccccccagtggggggggggctcaaacagaccttgttaagaagagataattttccttacaaaatgtgttaattgaaggatttgtctgttgccttgtaggttggctaccggagagtaatacaatcaagagacaccatgctgttgaatggtttcttcaaattcacctggatggtgagattacccagaacagaactggcctgaggtgaggaaagccttctggggttgttgcaggcactggatgacttaatgggcatgaagtgtttactgcagtggttttcatctgggaaccgttttgttcccccaggggctatggcaatgtctgtagacatttttgttgtcaaaagtaggacagagaggacagctactggaatctgctgaagatcacagaatgtgcagtatggtgctccatgacaaagaattatcgcagaatgtgtagccaggcttgaagtaaggggtgcatttgcatttgatgatgatattattattaattattattacatcattattggtagtagtagtaacagtagaaatatcccccaccgtgtgtgtgtgtgtgtgtgtgtgtgtgtgtgtgagatgtacatgtaagatgtgtgcagatgttggactacaacagagattctggaataccacagagcctcccagagctctcagagttacagacagttgcgagctgcacaatatgggagctgggaatcaaactctaatcctttggaggagggaatacatgcttttaatggctgagccatctttccatccctgtgctaacgttatttacaaatgacccttcctaacaaaccctctcacccaggctggcagtgaagctgtgcataaagtctcaagtcagactctttacgtttgaagctcagcgtgagccttggcagcgtgctctggagcaagttacgtgacttttctatacgtctctgcctatgaaaggggattaattagagtaattgcctcagggagctgccagggagtcgaacgcagtagtccatacagagcacaccactgcggtagtacgtagtaaatggtcaataagcctcattgattacttttttgtctctgataccaaaaaagatcttcccacaggatataacgaaggaattaagaaaagtttccactagggaggagaaatagaaaatattgctcatataaagtatacactggcattaatttcacataatgatagataactacatagggttaaaattaaaataaaacacaataaggctattcagtgtgtgtgtgtgtgtgtgtgtgtgtgtgtgtgtgtgtaggaaatcaaagccagagtattcaactagcagcgttcttcacacacagcctcgggatgaacacttccaccacactggctcaggaaagggagcattctctcctccacggagtacccgctgcagagcagagtctgggttggatgcctcatgggaggagaccagagtcgaccttcaagtctggctgaagaagaaagacaattaatttgagaatgacaaaaatgagggtttcagggtcgatctaaacccaaatcctgaaagttagcatgactcctcatgctaaatagagtaattgtctacctcaggaccactgtccccaagagtgactgctaaccgtggtgctttctgatgccaaagccctttcacgatattatcacacttgtcccttaagaatctcatggtcacacatggtttcttcttccttttgtgtctgggatagaaggccctttccctgttcaaattttctgagttctagttttgtttcagaaacccacaaacatttaaaaaaaatgaaacggtagggataaaagaaatgacgtggggtctaagaaccaccgtatgatgtagtcagcagtgtggattacacatcacttcatcctcagccacaagcagccactgcaaaggccaccacaagattacacagtcgttgtgtctagctgtcagcccacaccaacaccaaggttggcttctctctaaaagatacctgatgatttcagcaatataatttgtgtgcaaggcagactctgaaggatcatagtttctctaaagagcagagtaatgtctagagctgaaagctgagctatacatgacaatcaagaacctgctgaagccattcaaactagactccttaacctttcctggtcacaggctggccagacatggcatcccaaacttatgtagcttttcttatcaaagccagctaatggatacttctaatgattctgggttatagaagtgactaaacaggctgcattaagttttcacaaggactttacagaattctagccttcctctgcactcagacttgtaagcaaggcacagtgaaactagactaccctccatggtctctgcatcagcccctgtctccagtgtcctgccctgacttccttcaatgatagactataatgtccaagtgtaagccaaataaaccatttcctcccaaacttgtctttggtcatgatgtttcagcacgtacagccatagtaactctaactaagacaaacattagttccagggtaatggggtaatgaggtaatgatgtgatagagctgtctattctgttttggggagaattatgaagggacttggaaactttggcactagaaaagtcatggagtgttcaaagcttggtaaactgttctctgagagcatagaaaacaagagtcttgatagaaatacagaggatagaggcctggcttctgaaggtccaggcttggaaagttggagagtcacttaaagactctattgggaccgttgcatattttgagttgagaatctgtagttctggttagctagggctgaagaattggctgtgagaaaccagaaccacaagcacgaactctttcctttgctgggataatcgatgctggttagctggagctgagaaactagtggtgattaagaggagaccagcagcactggggtgaaagtgtttcctgagactcagcacacaaaagcagtgttccagaggtggccaaggttgtcccatcgcgctggcagccacacttggtcccgtgtcagtctcccagaaggtactggttttgcagacatgaaggaatcacggagagcagccgaggcttggcactgtgagagtccaggagagaccactggtgaaggtgcagccagagtagcaattgaaggtccaggattgaatgggtcatgcagagaagttgaggcttggcaccatgaagagagcctgtgagaggctgttggtgaaagtgctcgcttcacggtgccaagctcttctccatgactccaacgttctggaatctcctgccagaattttggagattccaataccaggggatgaccaccaaggagagcggaagctgtggaatggaggcagtctaaacctagaagacaagctttagatgctgttgatggccatccaagccctttggagaattccaggtgatcctgagtggatcctagacgttagacactaagttattcacatagctggactttgctttgctttgactggcactgtgccctggttcttccctcgccaataattcagagttatcttttttccaacttttctgttacttcagcttttgtttgcttgtttgtttttagatagagtatcctgtagtccaggctagctctgaacccactaagtagccgaggatgacatggactctttcttccacctctgaagcgctttgattgcagacatccatgaccacttattgcttcagttttatcttcaaaatatagaaagtcaaataaatttaaaaaatttagcatacctgcatgtttctgagggactctcacttaaaactgaattgattataagaaagtatagcttaaattttcagaatttctggtatttagactgcaaatgtataagggtgtactttatatatttagaaatttcagctgggaacacttaagtggatgatttatggtggtcagaagaggcaagacgttttggcctattgtttttaatttttgtcatcgagcattgaaagataattgtaaggaaaaatgtcttattttctaacaaaagttgctaatctgacaagagccaatattctataaaatttttccaccttgtaaaacttttatgcaaatcttttactctctaccacctggtaaaatattgtttacacaaagactgggctacattcccagaacttgagggactgaagtagccaacctctcccctccctttttcttcattccatcacatcaattctttcctttaaattcttattttactattttatatatgtgggtgtttggcctgaatgcccgtctgtgtgccacatgtttgcctgaggaaaccaaggggggggggacattgtatcacctggaacataagttacagatgttgtgagttgccatgtgggtgctgagaactgagtcccggttctctgcaagagcagctagtgcgcttaattgttgagccatctcacaagttggcaaattgtgaaagatagtgaggttggacctcagcccactggcattattttctactttatttgtgttttttaaaaatctcttcctcccttctaatgcttattctttctaacactccaaacccaggtaagagagaaagaaggttagagaggaaagggggtgtaggtgtctttaaatgacttcctgctgactaagggcattgagttccttgggtcaagtccaatcttcatagtccatcttcacaatcttcaacttcttgtctcttttctctcacccataccaatggcagcatcaggagcagaaaccagcagcagccattttcttcttcagcgtgcaccccttagtctctgacattcattctctctctagactcatcagaagtaaactatctgcagctggcaggatcaggttcctgcccgaataccacgaggcaaatagtcagctgctgtggataaactgaggttaccccatgtcctacagcctggattaaaacaaaaacacatttacataacagaactggttttttttttttttttttttaagtcaccagaattctcactacaccatccagttctggggggttgcaagttgcatagtctccatctgcattagaataaaaaccaagtgaagatcctcttccaatgtgatagctagtttagtttttgtcttgctgcagcctttttccagtaagaaatttcattgttgtggtggtttgattgaggatggccctaataggctcatatatttgaatgcttggtcaacagggagtagaactgtttgaaaagattacaagaattaggggtgtggccttttggagtaggtgtagctcacaccaggcccagtctctctctctctctctctctctctctctctctctctctctctccctccctccctccctccatctctctctctctctctctctctctctctctggctgtagttttctcttcagcagcacggctacctgccgccatgctcccactatgatgataacgagctatgtctctgaaactattaagcaatccctccaattcaatgcttcgtgttatgagctgtcttgggtcatggtgtctcttcaaagcaatgaacagtgactaagacacttgccaagctacttttgttttgtttgtgtgttcctgtgccacactgggattattctttgtttctagcagacccaacacccactggatgtttggaatttgtctttggcttttgttctgctgatatctcaagcagttagtaaccgcaggcagaatgattgaagacatttataataaccgaatatggcaagatggctcagtgggtaaaggcacttgctactggttgcactccaacggaagcatctgcacagggcaaagcttcatcttgataaggtgggtgtgctcagaagggaagattagttgcacattaacggaaaatgtgtttggtttttttttttcctaacttaggagatggtgactgtgtcttccccattgggtggggtctgtccttaaaatcatatttgattgactggaaagagtttgtatataggaaatgaaagcagaggaagggcgtagggcattgctcctaggagaaaagagtcactaacagttcaggtcatcaaattcctgggatgtagcaggagcctctgtgtgaccacaggctttactcgtgggcgggattaaaactggcatagaagtcttacaatgtgggagggataaaaagctttgaattccttgctgtcttagggttttactgctgtgaacagacaccatgaccaaggcaactcttataaggatgacatttaattgggactggcttacaggttcagagtgtcagtccagtatcaccaaggggaaggagcatggcagtgtccaggcagacttggggctggaggagttgagagttccaacccttgttctgaaggcagctagcagaagaatggcttccaggcagctagggcaagggtattaaagcccacactcacaatgacacacttcttccaacagggccactgatgtgttagaatagtggcttacatctggacataacacactaggccaaagcagttccacatgtaagaggttttactggaaacaaagaggggagaaagagaaagacaaagggaaaaagaaggtgaaagtggggaagggtctttcttttatatatgctgtgatgtaacctgtttgcaggttaagtgtgggaagtggactttgggaagataatgtggttgccatagcaacaggtgacacctatgtgtgacatcctgagtttagagtgatctgtaacacaggccttttgatgccaacagccgtacctcctaatagtgccattccctgggccaaacatatacaaaccatcacacttgccctaaacacaagtttttcagtatttgaaagagaagactcatgtttaacttgtcttacaccatcaagcatgatgacctgagtttgatctccaagacccacactctataaggagagaaccaactgctaaaagttatcctctgtatctgcccagtgttctctctctctctctctctctctctctctctctcacacacacacacacacacacagtaaatgtaaaaataaattaattggattagcaatctacaaaaatgatcatggacaataacattatttttcttactatttggtgagtcagagatagcacaaatgtctagcaagtgagttccagtttggctgaaagggtctgatcccctgtatcctcagagcagccagcctgtggtctaggatttatgggccttctgttgctctcctgatagccaccatctggacaccaccagagaagccaggtgcagagcacaggattgtagccaggacaaagggcctttcaagaaaattgactttaaagtgtctaaaaatatgataaccagattgaatcagagtggtaggaagcaaggtggtggtggcagcagcaatagcagttgtgatgctttgtgtgtgtgtatgtacatgtgtgcattggaatgtcatgcattatgtcagaatggtttgattgattctaaaaaaaaaatgttttacgaagtttcctgtgtttgaggcttggctaccagctgacagatttttgataaatgaatcagaatgcaagctctgatttaattaatagattaatccatgggactcttagctgaatgaattattaaatgggctctcagagggaatagattgctgggggattgcttttaatggatatatttgttcctatgtgacctatccaccacgaggtgagccacgttgctctgccatgttttgcacaatactttgcctcaccttgcacagacccagcagcagtggagtcacgtgactatgcactgaagcccctcaacatttgagcccaatttatctttcttcccttaagtcgttttgctcacatttcgacacagcaaccgaaaatgactaatacagacctggcagaaatattacaacataggaagccattaaatcaatttttatatggatataagaattactgagtattttaaggtactattgcaacatttataggcgaaagaatagacattaagatatcaaggaaggggaaaatagaatatagttttataaagggataaaagggacgttgtaatcggaggaatgatggggtaggactgggagggctggggagaggaggaactgtgccaaggaccatcaacactaaaggcctttgagaagtcgtatggaattctactactgtagaagctttctaagatgtatatttatatacagagtttaaatggagttagcatatcatggggcagggggatcagtatctcaactagacatcatatactaccacatacaactcccagcaccaggagtgagtaacatcattttgaattattggccaaagggatcccatagacccccacaaacattgcagggtattgctcctccacgaccggacagtaagcccctattgctgaaggctacaaatatttatagagtatcaaggggtccagatggtccttaagtggaaactttactcctactggctagtgttcacataataatcctttatgatattctcaaaataaagtataggcttgggaattctgtccctattttgactgctcaggtcttccaatccccttactgaggattcccatgtgtatgtaaactgtagtatccagtggaaagacaaatgagttcattcttggcgcatctaatctttgtcccttccctccccacccacctgttgttccataaagcgcaggagagggtgagagagaacaaaagagggtcagcggaaaggactggttacagaattgcagcactgagcagggagcaaaggatacatttgctccaagtacaaactgaaatactggctacattttattgtaaccagaggaggggtggggggtgggggtggggtgagggggcaatggaaatgctaactacttgcattgtctaagtaagaacatttgcttgccatgtatgctgtctgtattcatcaaagttttcccctatccttcatttacactctaaaacaaatgattttttttttcttttgcaaggagaacaagaatgtggattgcgtcatagtaaacgctgtttatagacgtaacattaacaagttccattcggccacttgcagagacaacggtaaagcagaagcccaaattttcataagtctcttgtttatgctcatatcttgcactgtttactgtcttccaaacaccagaaccaagcacagtgtctggctttcagagagattaactatcatttactaagtaaatgagtgaacaatgtttataaactggggtagcactgacattcgtcctttggtttttggttattatgttgtaggttacatgtaccatgttgttcttacacattggtaaacatgagaaacagatttaaatctggagccagaccctctgtgtttcttaagaccatttcctcatctttcgtgtttatcagttagcacaacagttcttgttagagggtggctttattaggcaaagtgactcaaaatgaagaagtctcagtcccgggtaacttttttttttttaaagtcagacccaaacggaagtgagtatgaggtgaatctcaggaacttgaagtagagcagagatgagaagcaggaagcaacatactatcaagctaccgatgggaacacatttgtgtcatgtgagtagacatgacagaaacagctttccttaaattatttgtggcaatagtgatcaccttcattttagtcctgccagaatttttcaagacaccaaaaggtaagtaaaccattgcaatccagctctcgtttcttactttagagcacattgtcagcgagtggtgacagacgagatcttttggggtgtatgcagcatgagctgaagttcggtgagtgaactgccttaagtgaaacgagataccaatttttagttgcctgttatctagcatagtggccttaggacttagttatgttacaattgaaaatgtaaagaaatatttaaagtctgattttcgattccagacacgggacttaagagaatagcatcttatgagtttgttctttgaaactgtttccttctttcaaaataatcatatatatctgcttttatattctggaacttactaagggaacggacatttatttattttaaaatgagccatttgatcacaaggtgagactaataatttcctgctgatcttagaaaaataggagtaaattttagtatttttaatatgcagtaaaaccagatgggtacaaatataggcaggtatgtgtgtgtttgggagcattgggaacaaggcaaaacccactctgagagcccttcaaagaattgttatatatttgttgaaacttcagggtagagaaacaaaaaaataagggaatttaaattattttttatatattattaaaagattggaaaacatgttattgtgggtgtttaagtgataattgtgttcattagcctttaataagaaggttaaaaaaaaaactccactgttctattactaaataggaatcatataaatttacgaaaactagagaaaaacttatatttgatatctcgctgcaatgaatatttattgtcgaatatatgcaaagatatgtattcagataaaaatacttttgctaattatatttgatgacatactgcaatgattatttaatgttgcatattaaatgatgctaagtagccagataaaaatatttttgctaaataaacactgtaactgcaatttttacgaatgatcgaattaaaatttttttcttttggtttggttttttaaaaatatatatatattgagcacgtatagtgtatatttttgatacttattttcacccgctgaaaatgtgtcctaaagaaaatagaataaagacaagttatttttaagatattttgggcttagagtagcaacatgtttttagctatctaagctaggccttctctgtgtttatattcctattactttgaccaattagtttgcatctaatgaatatcaggtaactggcacacactgtttgctaagttggtcagtgctttaagagtctattaaggattgtgaggaggagggaaaagacagaagaattgttcttttgaccactagttcttgctacaggtgacaccagaagaccagtgtggcccaggaaaattcagagaggtgcatggtgggcacctcagtgggcctttgattttgtaagcagaaggattcggttttttgtttgtttggttggttagtttggtttgtttttcaaaatacacttcagctgaacttgcctggccagagagccagtctgttcttcatgttgacaagagccatttataagatttgttttctcagctgccactgtgcttcattgcttgtcctaaaccagaaggaaccacttctgttttctggttggagcgttctggttggagccagcatcaacggttgtttccattctttgggatgatgaaattatttggctattttgtttcaaaggatccttactgtggaacagcaaacaaaactgcaaactatggtcttctcctgatgtccttcagtggtggaaggaattttgctcaaagccaccacaaagtgttgattattgggttaactcacacacacaatagtataataattatgttttataatggtctgtgggtcatcaggattattgctataacctcatcatgtgtaaccttatattgattaaattaaggggatgtggatttaactattttgttacttaatttgaggcatgagggcgggggggtgggagggtgggtgtggtggtggtggtggcaaggtagccctggctgtcctggaacttgctatgtaggccacgctggccttgaactcacagaaatctggctgcctctggctcccaagtgctaggattaaaggtgtgtgccaccatacctggccattaatgttagttttcaatctgagtatgagttaggactctcagggctaaggcctgtcaggcattttccttttcttcctccagattgtattgtctttaattctaaaataaatatgacaaaattattcgacttctaaattacttaccaataccctgtttttggccatgctaaataaactcagaaggaatctcaaggtggatcaatgtatacaccaagtttagtatatgtattttcaaagcaataaactttctaaatccccaaattgaaaagacagcatcatatctgatcatattttatcaagaatacatccaaatctttgaaaaattattaacaggaatcttctgttgttacaattatgtagcaatagctatttggtctaattttaagaatgagagtagatattgcttgccactaaacaagggggcattggcaagatgacctattgtccaacaatagtctgaagcccccagttattttagaaggtatccagaacacagcagttgatgaacagcttaacccacttcaattgcttgtagagaatggaaatactgattccatttcttgcaactgaggaagcaaggttgctcccaacgacaaaatcaccaacctgcttttgttggatgaaaccttaagatggagactcaggaggctggagaagtggctcagtgctcaaaagcaccggctatattcccagaggacctgggctcaattctcagcactgcatggcagctcacaacagtgtaactccagacccaggggatcctacactgtctgctgggctgcacagccaccaggcgtgcacatggtgcacagaaacacatgcagacaaaacacacatgtaaaatttgagatggagacttggttaaaccttagatcccagtggtctgtaatttattctttcacttatccatggtgtctctctgtgctgggaagttaaggcttacaaaaggaaaggcaagtctctcctaaggggtttttcagccacgaagaggaccagtggtggagcaatgaagtacaaccccataaagagtaaaacgggatgtggaaggagttacgagaacattaatgttgtttccaggactatgctgggaggtttcctctgttcccacttgccaaaaaataataagttggcagaattcaaataatcccccactattcttgctcacagaagcattttctaagagaagtcatgattcttattgattttcaaataaaatgttcgcatttatcttaaaactttacgagagcagacatggtagggcattatggaggcttgcagcaagcaggacaagaacagtacagatgagtacactgcgagtcattatgtcccggtgttttgatgttgcttactttgaagagtcaaactctcataagatagattcattggctttcatttctcttccctgtcacactttctggtggaagtggtggtgtaatgagcagtaaacagaggcaaaccaaggatgaaggacctttccttgggaattataggacaagccctcctcaactctgcagtgtgtctccactgtgtttatgtttctattacaaaggaagagtattgacacagttgcaatgaatgaatgaatgtccttgttttcaaactctgggcactttactttcttcttattgacttcttcataaaaatttaatcaatatccctaataaggtttaggacatatgactatttaaattttgagctggcagaggtcaaattgtcttgcccagaatgctctcaagtgattctcccacttcaccctcccaagtactgggcctatgggtgctttccactgcatctggctcatttagtgtgtgtgtgtggggggggggggctgtagcacatgtagcagccagaggtcaatgctaagcatccttctctattgcttccaccgtaattattttaggcagtatctctcattgaaccagagcttatgaaccggcgtgactggttcctggtaacctctacggatctgcctgtttccaacccccagtcttagggttacagatgtgtgccaccatttctgttatttttaagtgtgctggggactcaaagtcaggtccttgtgctcatgtggcaggcagttaaatgactgagccgtctccctagacctctggctcaatatttgtagaaactcttaacaaatacgtgcatctacatataccaggcatgggactaaatatttttacatggaactccttttttttgtttttgtttttgtttttgtttttcgagacagggtttctctgtgtagccctggctgtcctggaactcactctgtagaccaggctggcctcgaactcagaaatccacctgcctctgcctcccgagtgctgggattaaaggcatgtgccaccacgccggctccatggaactcaattttaatggattcaatactcaactaatctactgggaaatgtagaacaagtgtttggcaggtataaagctctaggtttggtcttgggtagctgctggcccatgagcggatgggaactctatcttgacctcctattttgccaagagtgctggggttgctgacaagcaccaccatgccaggctttggcacaagttcagggactctgaactggggctgtcagtcttgtttggttacactttcacctactgagtcatctccttagctctatttttagtttcttgagaaaccgcctcacaaacaaatttccaaagtggttgcaccggtttatactcctactgggagtgtgtaaggattcctctctcacggtgtcctcacagcacttgtaatcattcgttctccttgatggagggcaagtcattctgactgcgctaagatagaatctccacatagtttaacctgtattttctgatggctggtggtgttgaacacaaatgtttattggccattaggtattcttctgttttagaactctctgtcaaatacatttacctgtttattggttggatttgtgtgtgtgtgtttgtgtgtgtgtgtgtgtgtgtgtgtgagagagagagagagagagagagagagagagagagagagagagagagtgtttagtttcttcagttctttacggattctgtatatttatcctcatgttaaatgtataatgacaaagctgcttctattctgcaggctgtctgtttattctgctatgcaggagcttttcagcgtcatgcagtcaggatatcatgtggctgggttctagtgagggtcctctagatacagatgtctagttcccctgaatttgcatggggcagaaaggaagcaagttatctggttttataaagcacaattcctattctttagaattccactttcatgaattaattaccccatagactccacctccaaatatatcatattgagactggagtttactagatgagttttaaggggatacaaacagcacattgaattggttatttaattttacaagacagtgccaaatagtttccccaaaagattatattagcactgttcctagtagcaaaaatactatatactgggatttcactgagtatcatgaagctgtagatagaatacatagactcttatataatccatatgttccttacaaagtttactgacagcttgctaattgaaaaataactaaagcattacagaaagaagactcagaatagttatctggcaagcaatggggaaaactttgtttgtttcaccttggacgaagtgagggggaagaccttatcgagagtttatacatatctgccataatttggatactgaggtctattgtgtgcaagatataaaaagctcaatgcaagaaatgaactgaaggcattttggatcaatggtgccattagacacacagcagaggcaaataccaatattctgtggaggaagaaaaaaaaaaaaccaaaacaaaattcaaaccagtcctcaaataactcccaaataaaataccaaagaaaataagctattaaccaaaacatcataaaacacatggagactaaacacacgagaaccaacagaaacagcagacagcagaacctggtcttgaaagaatattatattacatttattaataattaaagcattatacataaatacttaattatttcagtagataagaggagccttcaaaattataaataatagaagcatatgtttggatctttatttcatatcgaatatggagccaactcaagacacatttaaaagcattgtaagatccaagactgtcaaactgttataagaaaagattcttgatttgttggtccctaccatgactttcagaaatgtcatcaaaagcagaaggaacaaagattttaagatagacaaacagaattgcatcagactaagaaaataaataaatgtaagcaacaatcaacacagctgtggacaagagaagatatttttaggacacagtgtaacagctatagtcaccaatttgactaccacattgtaaccacaattaagacttaactttccatcttccccaaaagttctctcttgctccaacccataagaacccctccactgccaaatattgtgcattttcctaaatctcatataaacggaaccatgtgatgcacagtcacctgtgtggcttattcgactgcacaaaaacaccattgtgatcgtccatttgtttcttatagtttcttctgtttgtccccgagtgctattccatcatatgccagaggttgtttttagattcactattcactggaaatgtggattgttttcagttcttggctcttacaacattggaaagctaccataaaactcatgtgcaggtaaaatagaagcatctgatcatgcggatgtttttatttgtgtgtgtaaattcctaggagtgaggtttggggaccatatggtaagtatatatttaacttataagaacatgaaatctgttccccaatgtagttgtgctgttttgcattcctatcaggaatgtatgatgtaacacttcaaagcatcattagtttgaaccactaaaaatggaaacaacccaaatgttcactgtcagaaaatagataaattatataataaattcattcataagacccaacaatttaactacagttgtgccaagccaacatgaccacagcatattaaggaaaaggagcaagtcacagaagaacacatatggtaatgctatgcttttgtgggcttctaaaatgtgctgagatacagggggctgctgagattgcttcaaggatgttggcaacagcccacttctgaatactgggataggaatactaatatttgcctattttcattctccctgcccccagatagggtttctctgggtatccctggctgtcctggaattcactctgcagaccagggtggccttgaactcagagatctgcttgtctctgcctcatgagtgctgggactaaaggtgtgtgacaccactgtctggtgttattttcactcttcaatgtgcacaaagcatcttgtacaaacatatgtgtgatctcttcttacagcaaaagttaaggaaggaaaatatagctctttagtgttgtcctttgcttctctttgaaaaggagaaaataattggcctgcccctttctccaactctgttttcctaactctatttagtattcggcgtacctcctcagggaaggtgccaacttggtactgaagtcattctgggatgcatttgcatctctcagagtgggcaggtagaggtctgactccaggaatattaatggaggtagttaaattcacaaagtcctggttatggaggtgggaatacagcccgcccaatgcctaaagctgttggggaggaggatttatttttaaaaattataccaagaaaggctgtgtcctctacttattccttttccaatagaattatttaaaattgaggtttaaaaaccacataaaacaaccagatagtcaaatatagagggtattctatccattctggaaagctgggctggccacttaattgaataagactgcaatgttgacagcaaaattgtctccctctcctttctaggtcatgtcatagcaatataaattcaggatgtcgaaaatctcgcaagatcaaagtgccagtgagcgagatggagaggtggcaggaaacacaggcttcatgtgttttagtaatattgagagaatcctgagagcattctgtcagtatgtgcacggccctccacctcctttgattattgctactaaacaaaataatttttaaaagatttatgtatttattttatgtatatgagtaaactgtagctgtcttcagacacacctgaagagggtatcagatcccattacagatggttttgagccaccaggtggttactgggaattgaactcaggacttctagaagagcagtcagtgctctgttacagttatgaaccctttacaatttttactataaaatatttataacatcataagatttatttgaataaaattctgtttcccccaaggaaaacttttattaacaattcaattttgaaatttcttcaccattagaaattacatgtgagttatttgagaaatacttttaaatacagagggctaggacatgagtgtttaaattattaaatgacagtacaaatcactagtaatcagatgcttatggaattactactaaaatataaactccattaattaaaactgtttttaatattagtcactagtttggcttccttttaagcctgaaccaaggttttgaactaaaggtaactactttaaaagtggagcacagttatctgtggcacttagagatcctaaactacatggtagagaggaggtgaagaaaccacagagaggtaggattggccatgtcagttatttcgtatcaaaaaaaaaagctgacgctatctgagtcactagaagacgtgttacctagtccttaatagatcacactgctagatgattatcctcaattacgcaatgagctcaaatttgttcatattaattagatcacaggtaagccctagcctaggcaagggaggcatttaaattttattcatttttattttgtgtgcgttggggtttaatctgcatgtctgtctataagggtggaagatcccctggaactgaaattacagacaattgcaaggtgctgtgtgggttttgatcagcctgacccctgtgcatttaatttttttttctttaaatctggaacacaggatcacatttaaaaatttgaaggccagaagaggatgttgggtgccctggaaggggaattagagatggttgcgagccaccatgtagatgctgtgggcccttcagaagagtggccagtgctcttaacagctgagccatctctcctgaccaaagggcctgcgttttagacagttcattgtagtaaggtagaaacccatgataggaaggaaccgctcacccatgactgggaacaaaacagtcaagtctcttagtggtggatttggtttaactcttgtattattttaactgggttcccaaaattgcacgagattcctcacaggtaagacaccaagggtccccagctctagttggctttgattggtaaataaagttgtcagaggtcaatgactgggcagggagacagaggaggtactttaggattttggggctaggggactgggagaggaaggaggatttagaatcaccaggccaagaaagatccaggcttgagagctgcagaagagagaacacaccaatcatgtaagaccggggaagagcggccccaggggtccctgattgggtctacagtagcaaagatggaatatagattttagtaagtaataactcgggagtattggaggggaggcgttagcaaggtggaagtttgagagtggcccagtcattgagctgtttagggcatattaaaatagaaggctgtgtttatgtgtcttccattcaggaactcagaacactggggcaggtagggaggaacttatgccatgccacacagtgatttgagtagagaataatcgcctatggcaacatctctttgtctacttgctctcactctttccggcaagtccattccttcattagagcctactcttttgggaattccagcaaatactgaagatccactgagacgccatccttgtagactgaacaactgctggattcttagactccccatcagtaaacagacactgttggtctagctggactgcagcctataagctactctaataatcatacatatccatatatgtacacatacatatacacacatgtatacaaattatatatgtgtgtgtgtgaattatatattatatattatatatatatatatttcacttattctatcagtttgtctttctagagaccgctgactctacagagggagctttgacagagcaatagagctgggagagtagaaagcagagacagaggagaaagtactgtgactatagagatggtggtatgcataagccaaggtacacaggcagctaccaggagaagaagactcttctagattccctaacgcttagacacttcaggatttctaactactgacattaacactgaacttctggccacccactcttcttccgaatgaccaaggttgtggtactcctttctagcagacttaggaaacagacacagaaatgctgtccaggttttggtatcttttcttcagatccatgcaattgactttttgaacatagatcgattcagacaaacctaagatttatctgttaatttttccccagcggctggagagattggccggtggtcaagcatacttactgttcttgtagaggacccaagttcagttcccagtgcccatgtcagggtgctctaactccagttccaagggttcccacgcattcttctgacctccacagatgcacacgtgacatatatcacacacacacatgcacacatatacatgcaggtgcatgcacacatgcatgcgcgcgcgcgcacacacacacacacacacacacacacacacacacacatcctttgaaaatttccagaagcagggatggctactgtctctaatcacttctctacatgggtatttgttctctgaaaactaacacggaatgttgacaagtttaaaaaaaagaaatgcttaaaaggagtagatactaactcatgtgaaaacaaagccttgtcaaggactagccatcctctgccgaggaactacgaagagcttactctgtgtttattcaaatgtcaaaaactcaggaatccgcagctagctaacgagttttgttttgtttctctgcagaaagaacccgtgagctctcctgtctggaagtgtgtttcctgcctaatttcacctctccgctttcttctttcaatttttcttctgtggcttttctgcaaccggcagaggaaatacagactattatgggaatctctccaaatcactccagtttccaaagcttcgctgagatttgccgaggcatcacaagtagattgccgatgtgttccttgtgtttggtttgtgaatccaaaggagatgtggatttcacttctcaggaacaaacatcaaaaggtaaacacaaaggaatagactgacatttaccaagactaaattaagttgttcttgggggtgggggaaagcaaccattccagggctggagagctagctcagtgggtaaagtgctttttgccttacagtgtaaagaactgagttctaactctagaacccacataaacactgggtgctgtggctggagggatggctcagcatctctttcagaggaccagcatccacgtggagcagctcacacctagctgttactccagggctggggaatccgacacactcttctggcctctgggggcactggactggtgtgtacatgcatgcacatagatgcacaataaataccaaataaatattaaagaaaagaaaaagctggcataccggagagcctgcttgtaatcccagaggtgccaagtgggaagcagagacaggcaggtctctggaagctcactggacatatggcatatgctactgggtggagctctaggccaatgactgaccctgtctcaaacagaagtcaaacggcacctgaggaaagacacccaaggttgtctcctgaccttcaaatgcctgtgcttgacagagtacactgcaccctggcccccaagcattctggtttaacctctggtgacactggggacacagtggtgtggcttctaatgagtgctttcacagggctttgtaaacttgatgagttttagtttaacctattgaaaacaaaattcataaaatctatccggatgccagtgtaattcacatgtatttgctagctaaaaggtcagctgtgtgttctctccagagagtgattgtttagaataaaattaaaaacaaacaaacaacacttctaagtaaatgcttagcagtcacccaccgggtatgagctgtcttctgtctctccagtgggcctcttgtgaaccaggcagttcattcacaaattgtggaatatgctggtagcctcaagcctcaatatcatcatcatcaccatcaccaccaccatcttcgtcaccaccaccatcaccaccaccatcacagtcatcctttatttagcagaggtgctcctgtatcactagtcactgaactttttttttttttttcattctttgagaataaggtcaagattccttggcattgctttggacataattgttattcctgtagttttataaccatctttagatttttgccccgaatctacagaaaacgagttggggcagtgcctctgtgataatggaaggctaggaagcattttaaaagcaggtggttggcagccatcactgctctgtcgcctcagacatacgtgaacagggctttgaaatgtggtcgtcatcctggccgtgtaacaaatcaccacaccaacagtggcttgaaacacaacaatcccctggtaactaaagatttatttagttctaatgtgtgtgtgtgtgtgtgtgtgtgtgtgtgtgtgtgtgtgtgtgtgtgtgtttgcttgtatctgtgcaccatgtgtctgcagtggccacagaggccagaagagggcattgggtcccctgggactggagttgcagagggaactacatgtgagctgccatgtaggtgctgggaattgaacagggtgctctggaaaagcagtgcggcctcttaactgctgagtcatctcttaactgctgagtcatctctccagaccctgttttctttaggcatttgccagtcagcagacattcaggtggtttccctatttcagttattgtgaactgtggggatacgtctttgagagtctgatttcggcacttttggatgccagaaggtgagattgttggagtaagtgagattagaccgctcagtctttgaggaacttgttaactatttcccaagctgactgggcggtagtgtctatcccactatcagaacaaggacccacattacccccactctcaacagcattctttattcatcttctccacatggggcaccctgacaggagtcagttcgattctgatcatggcgcaaacttgcatttttatgatgacaagtgatgttgaacatgtttgcctacgcccattggatgtttgcatccacccacaggacatggatcttttaacagatgtaagaatctgttcaggttctgtgcgggattgtttgttctgagacacggttttcttatgctacccatgatggcctccaactcctagtatccagcaatcctcctgcctcagcctctggagtagctgagacagcaggcattaccatcatacctgatatttgcccattttaaaatcaggttgtctgtttttctccgtactcctccttcctcgatgggaattccttacatgtcctggatatgcccgtttatcagctataccctgtgaatctttcctcccatcccataggctggctcttccctctctggatggtgtcttttgtttgtttgtttttttttttcgagacagggtttctctgtgtagccctggctgtcctggaactcactctgtagaccaggctggcctcgaactcagaaatccgcctgcccctgcctcctgagtgctgggattaaaggcgtgcaccaacacgccctgtggaatggtgtcttttacgttgtctttccactttcattcaagtcccaagaatcttgcagcaagttagccataaagtgggccttttcacggtgactcaagaatctggtctttgtatcccaaaggaccaagtggaactacttcaccttttcctgcttggtgatacaatgccattttttttttctttcttctgcacttgactatcttaaaattaggtctggagtcttgagaaaatgaccacaatattcaaagtatttcagcaaggcaaaaaggtttgcttttacagaagggggtgtagccagccttaatcaaacaagcaagtatgccctccaggaatctcactgggtttttattactaactccaaggtgttctgcgcctcactgggagtggccagggtgcttagccttgcatcctgctgctggctaacttaaagcaatgcagctgagaactgctgataactgagacggggatgcaactttgaggtcatactttgatcttagaaaactgctgactggggaggaattttgttttttccctgagaccgtagctttacaaagttctttaaaaacagagagccaactatgtctcctttaaatctttaatagaaaagtttcatttacatgcccacaaggagaaaccagtctaactctccagtactctatggggagggagctaaatccccctatttgtgggaaatcagtaaaattttgggataacatgtggtgtagactgaaatgtatcctctcaaattttaatatgttgaagtattaaccttcttcaacactgaggctgtgacatctggaataagattgtggtacatataattttcttaagatgagatcactgtcctggaacctagctcagtaggactgatgtccttttaaaaaggagacctttgggctagggaggtactcctttttaaagtgctccccagccaagaaaaaggacacaagttagatccccagaaccagaatgaaaagctgtgtgtgtaacatacacttatagtccctgtaatggggaagtggaaggattctcgggacttgatgatcagccagtttagccaaccagcaagctccagattcctgcaaaataacaaaggttcatgtctgccccctacaggtgtacatgtaggcacacacattagcttacacactatgtatacacactatgccaatatgtcgacatggaaaaacacacacatggaaataccatgtgaggatgaaggaagtgactaaggtggtgtttctgtaagccaaggaaagcaacaattttaaagttacaaatgtgataattatgtccatagcttctttttctattttaagagatttgggtctttggttggttgcttgtgatcgtttgtgttgttgttgttttggtttggtttggtttttgaggcaaggccttgcactgtaaccctgggtggtctggtactgtcctccatcagcatcccgagggttagggacatcataactatgtccagtgatacttagctctgaattatgttttcttattagatatcaccactctgcaaataaccggttctcaacctcgctgtaggtcttgtcatgaggggatcaatggaagtgacggcaagtgatttgtcctcaccctgtcagtattttaacatcaccgccgctcttatagctgaccctgtgaaggaagacaacactacctgcactcccgaaacccgtcctggaaaagcctcagctgtcgatgaagatctggccaggaaaaagtctctcaaccacacttgtagatttatgaaaagtacgaacaattgtgctcacattttcttgcgcctagaaacggatgtaaaacgtaagtttgaaaggaggttagagggaatgggagaactttggtatctatacaaaaacattaagaaagagctgtgacattaaccaaatgtcaccggaagttgagttgctgaagaattttgttgctgaaacaatgcaacctgaaagggtattaacctttctatgtatttagttttcctatcaaaatgtatttttatgggactcaaccataatcggagatagaggtggtatgtctgggttgtgagagacatgacttgggacactagaaagggacactagaaagattctgtcctaggagagctgtagtatgtctggtatctgtgcttgatgaacagccgacaaacctcagaattcaaaggtgggaggttttttttttttttttttaaaggtaagtatccagagaggattaaagttggcttttagccagttcaacccatcctctctcagagctgacacagcccaggtgaggagagttttctgatgtgatgttgtgtggattaggcacctgggggggggggggtgtcaccggttgcttctgaggggtaagaaggtcggatgtatgtaaagtctgttcaaggctgattaagtccctaacaccctgttctgagccccacagttaatactttttgctaagcactgtgccccacctcaccataaagtctattattagaaagcaccttatggtacatcccttcagcgagcgccctctggatgtcaagccctgtgctgggacgggagcccagagacagaggaccagaaaactagagaatgcaatcacctgtaaaccgtgcctcctggagctgctagtgccatgggggactcttccctagacattttggtgctccaagaatatgggcgttttcccattactttagaatgcttttctaaagcttagccatattaaaggtaattattttttaaaattatgttttcagcaaacatagatatagaaggtgcagcctccccaaatgttccttcacacgagtctctggggatattttctatccaaactgcatgtaccagcctttacctggcagatcaggatttgatccttcatctctctggccacccatccaggtcagcggggtcctctgtctgcaccagcgttcacactgttgccccacctccagggcgccggctgggcctttgttaatttgagggcatatttgggggggctacgaccaagatgattaatggcacacagctctgactctagtgccactgccctgtggcactcttgatgtacaataagaacattggtattggcatcacctggaagtgaaattaaatgctaggggtttgaattgaatggatccctgggagccacttggccaatttcctcatttagtagctttatttcatatagtggaaagacattcaggggagcaagggaccctgttccagttaaggctgcaaacgccttcaccattaaaggcatgtgccacaatattgcctcttatctgaggtactatctcattgtgtagagtgtgtgtgtgtgtgcatgcgcacacacatgtctgccatagcacacgagtagaggtcaaaagacagaaaccagtggttggttctgtccgtgcttcctgtaagctatagggatgatagaactgtgtgttgttgagtacttaagcctgctaactagctaactagtcctttattggtttatagtgtttaatatatatatatttttaatttttatagctgtcacttgttccatgaagatcacttggtacattttagtgctattagtttttatgctaagcatcatctttattatccacaaaatacttgaagaccacaggaaagtgcggagatggcagagtaagtactaagaaataaacgcgttgcaaggactgtctctgtgagggcattcctttgcccaggaaaacacatacaaatacctgtttgccccctgattttctttttagttcagatggccacttattgtgtacctactatgtgtaaatgctggttctagacactctaagaaagtatcagtcttcgagtcagctagcaagcagcagcctgctgtgcttcctggctgtgaagggagttcccaggtggagggagcagcatgcagaataagagtgatcaggactgccctgacttccctcagtgctagactgttaccaggaagtgtaagacaaataagtccctaccccaagttgcctccggttttggtatttgtcatagccccagaatgaaaccagaacaatatgtaaacagtactatgattttcgttttgtgcatgaaaaggggaaaaaaatgaccaaactcagaaaagttcatggtttcgtccaaagctgcacaattaacaaaattacagtataaagacttggtattttataggcattgaaatctttattttaaataagtgtatgttatttgaaaataattttcatagttctatgtttcttgaactctttttctatgtgaatacaattaagaaagaaagatacaaggtagaaaaatgcctagaaagacatgggtagtgggacattacccattacggtacccattacattacccagtacattaaattctttcaaatacctatccagatgacaaatttgatggctttcaaaggtttttcttacaagtctaagcatataaagtcatggaaaaaaaatcacaatactcatgccattacacattaatctgaaatgtttcctagatactctacatatcatatcaacgtagataaaagtagtattttataaataagggttgatacttttcatgagcagacgggccataatgatatttatggtagtggagaaaccatcactttagaaagagtctgtgggtttttgttgtcgttattgttttgtggtttgtttgtttgtttgtttgagacagggactcagtacgtagctctggctggcctggaactcacagagatatatctgcctcttcctcccggggctgtgctaaggttaaagacttgcaaccaacaggccctcgtgtttgttaatgagagaggacttaatggtaaaagtccttcagtgtcttgttgctccagaccccttttggaactccttgataaccctttaaaccagaaccaagaagacagcaagaatgtgattttgtaagggaggggcactggggtcttactatgtagtccaggctgacttcaatcagtatcctcctgcctcagcctcccaagtgctgggattagaggcatggaccaccacagctaatgtgcttgtttgtcatctaaatgtttaatttcttttcttggaacaggtcataagtacaaatctacatctggtctcttaagaggaggtggctctgtgaagctgagcactttgagcatgagggttattccaggtgagtctgcggcagcctacggctaggacaggagattcccaaagctgctgtatcagttcagagcaagctcaagatcggagttcattttcagtagccttgggactggaataaaggaactgtgggcaaatagaatccagcttagtatttctcattatcaggggacagtcatgatcaaagccacctccctaaataatggaaagtttgcctaattggcaagaagaaactcctgtgagtaggcaggggagagaaagccatagggaacacgcctggggtttatttttaaatgagacaagataccattatttctcagaattgcatgaagtaattgtagagtgggcagagcctctgccggagccttcacttcacggggtgtctttgtataaagagaactcctaatagcctcaattaaaaagccccctgtcctctccggagaaaccgggagggactaaggggatcctaattagagcagctaagaaggccgtgggcacagatgctctggctccagtctcatctctttctgactgtgtggcctcctgaattcctgctgtcaagtcacattataaagagagactatgatatggacagggggatgtccttttccttcacagaaaagaaatgatttttaaaaaactggaaatccaatctagggcctggagcatattaggcaagcactctacacagctgaggctgtgtccatcccctctttctaaattttgagacaagatcccattaaattgctaatttatagctgagatggtcctcatacctgtgatcctcctgcctcagcctcctgagtacctgggcttaaaggtttgttacacggtctggcttttgtttagtttccattttaatctcttccagtctctctttctccctctccccctccccctcctctgtgtgtgtgtgtgtgtgtgtgtgtgtgtgtgtgtgggagagagagagagagagagagagagagagagagagagagagagagagagaaggacttactacatagcccaggctggccctcaagaattatagttctcctgcctcaggcccccgagtagtaggattatgcttatatgcctgtcaagaaggaatattttgaactctttaaaaagtcacagaattgagtgatgtttactgatattctttgtctccagtgggtggacagctcctttgcacttgtgagaagatacaaaaggaggcttcaggtctgctgtgtaaactctttttttaaaaaaaacgacaggaaactggacaacgccctgtcttctactgcagggcaacagcagccacctagagacccagccagcctttcccggggggatcatgtgcctaacgcttttgttagctactgaaacaagcagtcacccagacccttagtctgggaaaaattagactgtgtgcgcctaaagacctaattttaaataatccagacttcctagttggtattagcaagttattaagccatgtatggttacttagcattagttaaacaatatttagtgtcggctacatatggatcaagttaatagaaattttgtgtggttcatgaaaattttgtttaattaataacatatttaaaaaacaacccatagtatggttttaaggagaaaaaccgattcctaaagggaggtaatgatgatttgtccgtctgtctatctgtcggttcgcttatctagtatacctgctctaccccaggaatggtttaacccaactctgccgagttttgtagttacctaaggaagcttggccatttctgtttcctggccataattttgagcacagcagtcttgtctgagaacaagtcagttgttcccttgtcacctcatataattggagaagtcacaaattttaagtcccggctagccacaagatgagcctcacaagttatatttatgagcccgtggctttcctgcatccaaaaaagcctgtctcaggtctgccttccctcaatggttctcaataaaaggcccctggctttactaccaggcatatcgttttaatgttcggtgcagagccagggtgatgaccttttaaaaaagaccagcaatccttttaaggcttaacatcttcaaaaggagagaggtggattcctttttatttatattcctttaacctaaccgcaccacctcaccgctaccaccattctaagttgctctttctgagagaaatggaaagaaaatcacgtctcccctgagcgctgtttttaaggctgctctttgtaatgatggattacaggcagcagggagaggtaagggagaaaagcctgccggtctgaatctctggtaatgcggcagcatgaggtaaagaaagggaatggaaaaagcaaatgcctgtgcgccgcattcaacagtcaggtgtgggtgccagccacgcactccagagtgactctgtggctcatgaacgacaatactagtattgtcacacgggcgcccactgcgtagggagactcatccatcctcaaaatgtccaccctccaaaaaaagaaacaaggagagctcaccggatccttcctgagcctgatacatgttagagccgcgtggaggaagtgggccctgatattctcctccatgcccgagaaacagggcggatcatgttgtcttcttggtattaattttcttactttcttattcactcagttatcatcgtcacctgagtgatgacttccttttacccatccttgtgttcctcatggtagcatagcttttggtaggccagcacagccctagggagagagaggcataggaaagcggaggtgagcaagacaggaatcctgcctggtgtaatagcccacacctttaacctcagcactcgggaggcagagacgagctgatcgcagtgagtctgaggccagactggtctacatagtgagttccaggaaagtcggggctacatagtaagatccagtctcaataaataaataaataaataaataaataaataaataaataaataaaataaaatataaactttaaaattaaaatcttattcttaagaatgggaaaggtgaaaacgaacatgcagagtagcaaggactctgaatcactgcgccatctctccagccactgccttccgtgttcttgagatgaacgggagacatccacttgcgtgctgggcagcctttgtggaatcctgcatcaggtctctgatatcagtgtttccactcgctccagctgttgagcgggagaaggtgtcattccaatatcttgcccaatggtgaaaccgtcccaacccaaagctctccgtctttaactctctgtactgaacactgcagcactacctgccaaggatcccagcaaacacgggtgcctcaggcacggcgcctcctgcacagggccccagcaggtacagagaatctgctccgggttgtcttaggataagggaaacccttgttgaatcaagtcctggtctctgtgctgttctttgacacacatcaacttacttaattactttaatttttctgctagcgagaaaatggaatctaagagagtttaagtaactggtttactggtcaaagccgctgaaggcacacaaagcgaagacaatgggattttgtgatacttggttgaagttactgatttataggtagtttctagagtcagggttcattcaatcaattctgcccaaacagtgtagtctgaagacagttttcaacgggaacgaggacctggggatcaggctggctcatatcaaaactcttcttgctttttacatctaaccctggaaatggagatgaaacctgctccctctaaaaagctgtagcagcttctgcgacccaatgagttctcagaagagacaggttagcactggttgagagcattttctttcctgcagttaacgtgggcgggtcctaaggtaatgcagagaagagaaaattgacttttattgtgaaagaggcttagcgaatgtcaaaagtaggcggatggcccaattcatagtatccccaaataaaactaatggcaatgtaaagttatagctgccagcatgtttatgaccaggctaataaagactatgcaggtttcaatttcccgcagaagagaagataaatgactggtgccagatgttttgcaactaagcaagataacatgaaatcctaatttttacttgcttaactattacccataatattgatgactcttaaaatgcaggttgggttcataaaacagggaaggttatagctatctgcttggttatagactagctgaaaatgcaaaggatggctctttcttggcaggaaggaattcataagtgtgaagagtccacagctggaatagaatgatttattctaggcattcactgaatgtctttatgtgacagctatttatactagctctgaaagaaagggatggcaaaaatatgcttcgaacatgtcctccatctttgctcagatggtccctgcctaaaccctttgcctccattgctacccactgtgtgcatcccctttctctctaaccctgactttgtcttatgatctgggcttaaccaacactttccaagacaaattaagtcagtcgattgtttgcaagtaggaggacctgaattcaagaatagccagagacaggtagatctcgggctcactggtcagggagcctagcttacttgggtgagccccaaggccagtgagagaccccatttcaaaacagcagcacaaggaggacaggacctgagaagaaatggcacctctggtttctacatgtgtacatacatgttcacttgtgcatgcacatccatgcacctacacacatacacaagcactcaccccaaactcatttcatgtagaatatgaacatatttacatgtaccatatatgtgtgtgtgtgtgtgtgtgtgtgtgtgtgtgtgtgtatgtatgtatgtatgcatgtatgtaggtatgtatatactgaacaagtagtagtttggagacaagaacataaaatagttggtggggaaaacaggctttccaaacatgaggtgtagatattttcccctgtgggagacaaactgatcttggacagaaaacccacaagcagtaaagtgatgtgaaaccccctggcaggttacacggcgagaacacaaaattaccttggaaggatgaaatgaggttagagcccagatgtcctagatgcaaaagacctttgaacttcgatagaaatctctttgaaaagaagttgaagcattgcatgcagggcagcctggacatggtcacaggcagtgtgataggctttatttctactgctggaaatccgtcctgtttgtgagattcagccaggctgaaatccgcactggggttctttttaatttttaaaagctctttggagcttcctgaaaaatgtcaaatgtttgggagagagaattgacaaattcttgaaaagacgtttgtgatgtttccaaatattcctgacagcccttgttgcctttatgagcattggtgaattcatagtatttgagagaaactctattttccagtgtagcgtgataggaaacaatttcacttgtcttagctatgctgaagaaggtattaaaatgacatacacttgacttcgggtgttttttaaatcaagtcttagaagctttgcaattagcatatgagttgcatgtctttggataccaggagaaaccaaaaatattgtaacactagagaatattccagaccagccattattttgacaggtaatagcttttgataccacattatggttattctctgctgtaaaacatccacaaactgaatctacaagctgacgctgagcagctagctctccagtcagaagaactttactaattctccttgatatttatttcattttatgagtaggctcctttgatataacctttaagagcggtcttcaaatctcaaattgcagaaggctgcccaacatgtcttgtctaagggttgtctaagcaattatttgcacagaaaatttattctgaaagctttcatgtaacccaagtcaagttggaagtctagaacatccaggatcccaggcttctgggaagggtgattcaaatctaatagatcttagacagagcccaagaatttgtaatcattgcctctggtgaagttcaggctaacacactattggtcgatatattagtttctgtggtgtaaccaattatcccaaacagtggcttaacacaatacatgtgagttatctctgcttctgtgagttggaagtttgagcactccttagctgaggatggcttagctcagagacaaccaatgctaaactaaaatgttgattatgctgtattcttatctaaaaaccctgcttccatattcatgcctggcagaatttccttcatactgaagaccttggcttcttgctggctatataccaaaggccagtcacagctccttcatggtacctacagtcccacgtgactgctgctttgaggcggttagagtctctctgatcttggggaagacctggtctctctttagagagctttattagtaagtcaggatcagacccactcaaaataatctcccttttcatcagctcagagctaagcagtctgggatgctgattacatctgtaaaataccttcatctttatccagtaatagaagctaatcttggtggctgggaactttgatgtgagactgggctgacagaagtggtaccctagaggtggctggtatttgttgaccatgaaatgaaaatcaaaggatgttcagggcccaagtacaagggttctgtgaggaag

SEQ ID NO: 961 - DNA, 619 bp, Mus musculus
atgacagaaacagctttccttaaattatttgtggcaatagtgatcaccttcattttagtcctgccagaatttttcaagacaccaaaagaaagaacccgtgagctctcctgtctggaagtgtgtttcctgcctaatttcacctctccgctttcttctttcaatttttcttctgtggcttttctgcaaccggcagaggaaatacagactattatgggaatctctccaaatcactccagtttccaaagcttcgctgagatttgccgaggcatcacaagtagattgccgatgtgttccttgtgtttggtttgtgaatccaaaggagatgtggatttcacttctcaggaacaaacatcaaaaggtcttgtcatgaggggatcaatggaagtgacggcaagtgatttgtcctcaccctgtcagtattttaacatcaccgccgctcttatagctgaccctgtgaaggaagacaacactacctgcactcccgaaacccgtcctggaaaagcctcagctgtcgatgaagatctggccaggaaaaagtctctcaaccacacttgtagatttatgaaaagtacgaacaattgtgctcacattttcttgcgcctagaaacggatgtaaaac

SEQ ID NO: 962 - protein, 205 aa, Mus musculus
  VARIANT (1)...(205): Xaa = Any Amino Acid
MTETAFLKLFVAIVITFILVLPEFFKTPKERTRELSCLEVCFLPNFTSPLSSFNFSSVAFLQPAEEIQTIMGISPNHSSFQSFAEICRGITSRLPMCSLCLVCESKGDVDFTSQEQTSKGLVMRGSMEVTASDLSSPCQYFNITAALIADPVKEDNTTCTPEWGKASAVDEDLARKKSLNHTCRFMKSTNNCAHIFLRLETDVKX

SEQ ID NO: 963 - DNA, 86899 bp, Homo sapiens
  misc_feature (1)...(86899): n = A,T,C or G
aacaaatattttttgaatgaattaatgaatccaaataggagagatagctcgtattccttttgtagtggccaaacagctttcgtgcaatttatcttataactgaatcatgtgacttagatgtattaataaggtctaaaacacagcccacatttaccttatttaaaagtagaatttggccggaagcggtggctcatgcgggtaatcccagcattttgggaggcccaggtgggtggatcacttgaggtcaggagcttgagaccagcctgggcaacacggtgaaaccccacctctaccaaaagtacaaaaattagctgggcgtggtgatggatgcctgtaatctcagctacttgggaggctgaggcaggaggattgcttgaacctgggtgggagaggttgcagtgaactgaggttgagccactgcactccagcctgggagacagagcaagattccatctcaaaagaaaaaaaacgtagaatttgaaaaggcattttatctctcattctggcaatactaaggaacaggatttgaagaagcattcacagctaagaatttacgctgagatcttataactttgcccataaatggatccatagaatcagaggggtatgatggatcaatacatgctgtgaaagtcttaataattttccatgagaggaaacacagccataatcagaaaatttgacaactctactgataatttgatacatgatgtcagtaggatgtcttttgtgaatgcttaaataattttaattgataattatgatgatgaggttaacaatgttttagtctggttaaagtgtaataccaatacatagtaaagagaacttaaccctagtatgtaaatgcgcttaataaagaaacggtttgatttttcattttgtactctgcctactgggtgtgtgggtggggaggattaaaagattaaactatgattatatacagtatatatgttcaaaatctggatcccaggaatgtgatcttttttagaggacttaggagttcttttagtagtatttctgctctccaagttctgacatgaacagcctcctgtggaatcagtctcattaaaatagagagctatataaatatgaccagatcgtacccctgggaagcaaatctccaaatcaggagagaaaggtggccaagtaaatccaactaaaagtgtgtcccttgaagtttaccttatattctcactctggtttctcttggttcacctgtcaatttggcccaaatacaaaaaaagaaaaaaagaaaagacaagaaagagaatttccttagcttttttttttttttttttttttttgagatggagtcttgctttgttgctagactggagtgcagtggcatgatctcggctcactgcaacctccacctcctgggatcaagtgattcccctgcctcagcctcctgagtagctgggactacaggcctgcacaaccatgtccagctaactttttgtattttagtagaggcgggttttcaccatgttggtcagaatggtctctatcttctgacctcgtgatctgcccgcctcggcctcccaaagtgctgggattacaggcatgggccaccacgcccagcctcagctctcttcaccacagctaaaccaatctagaatttctaagtgaactttgctaaaatctaaaggagaataaaaatgaaattattactatattatggaaaatataagcaacaccgataactttattcatttgctcagcttctcttctccatttacattcttccaggaacaaacttccatccccaaggggagatataaatttgcaggcaacctgcctagtttccttccctctaggctctctttctttctctgcacagtaaggtcatttttctgtcttattattttttttctttttagacagggtcctgctgtgtcacccaggctggagtgcggtggcacgatcctcccacctcagcctcccgagtagctgggactacaagccaccatgccggctaattttatttatttattttgtagagatggagtcttactatgctgcctaggctggtctcaaactcccaggctcaagtgatcctcctcagcctcccgaagtgttgagattacaggcatgggccatcatgcctggcccacttttctgtctttcacatggccgccacaagcctgtcccagtcacagccaagactaaaagccccacttgtcctctgtccccattcttctggttagagggatatggcatagtccgggtcaaactgcgggactatggtgactgtcctaatatatgagctgcttcttcaggtgagactcactctttacacgtgttgggaaggtcatcaccggcccactgtcaggccactccttgcagtccccagagcattcccgaaagaactgcccaacacagcgttggggacatggggaaggaatgtgcattctctcatgcaagtatttccattcacccatttacaagtaggtctcctgtaaccaggccatagttactgactgaataaaaaggtctttgcaaaaagactttccgtacttcctgtcagtctccttaacctttctcaaatacaaatttaattctgttcatccctcaggaccgtgtttaacatgctttagtgactattgctttaaaagtaaagttcaaacaccttagcattgttgtaaggtcctttgtaatctaacccctatctacctatttagccctatgtccattctgaactatttgcagcatcgagaacatatcatttatcccacagctgtgcttttaaataagtttcctccttctgaaataccctgctttccaatatctgctagccctcaagactcagctccagggtcacctcctctggtgatctttatcctgaactttccaagctgaacgagttccttcttcgtacccccaaagtacactggatgcccctttcattgtagcagttactcaatgggctgtgaatattggcttagttgtctatctccttgactagctgagaggtctttgatggcaggcactcagaaatatttctgaatgaatgagtgaatgaatgaatgaatgaatgaaatccaccctccccctgcatatgaagcctttacaaacaaaaacttacttgagtatggccatttttccactgagtgttataacatatacagacaggacctttcctctatagtgttttactacgagtttcattaaactttagaaggtcattaacttaggatttcagaaacttacaaggacaaggttatgaacacaaagttcttgtatttatttccatgcattgaaaaaattatttcatactttcatgtattaaaaaattatttcagcatctctatataattattttacattttgaaaataacagttgcaagactactaattgatgttgatgtctcatgagttaaaaatgttccaggatgggccgggcgcggtggctcatgcctgtaatcccagcactttgggaggccaaggtgggtggatcatgaggtcaggagatcgagaccatcctgactaacacagtgaaaccccttctgtactaaaaatacaaaaaaaaaaaattagccaggcatggtggcgggtgcctgtagtcccagctgctcgggaggctgaggcaggagaatggtgtggagggaggagaatggtgtgaacccaggaggaggagcttgcagtgagccgagatcgtgccactgcactccagcctgggcgacacagggagactccgtctaaaaaaaaaaaaaaaagttccaggatgaatctttgtatttgatatattacttcctgattcactaacagaatggaactactcaatctgacttctgttttcatgttgtgagagaataagttcataaccgctatacaagtttaagcatttaggtttgttactgtgctgacagtttgtgtacagaaatcacaaaatatttaccaaatattataaagagggctacagcatagaaaacactgctacttgttatgagggagagaatgaataaagatgaatcagatatgtaaactgcaaagttcttatcaactattaagcttcttctagctccatcttgttcatctttgtaaaagcacatattcctgtattcacacctgcattctatattcagtgactatacttagcacagaattcttggggcaagattctagctaagtaacaagcagctgacctgaaatacacaaacagtgagtgaatagagggtggcactctctgtacacatttgaagacattcagagtcaacgggctaagcaatacaaagaaggaagaaaaaaacaaacagacaaaaaaaaacaaaaccaagcatttcattctcctctgctctatccccaagaaaaccaagaaatggtattacttagagtcggacgggctctcttgttgcagccagttctttttatctgagactggatctattaggcctgatactttcagactctgagcaatttattttactttatctcgtacatattcaatggttgttatatttaccatcatgaagaatgttttggttatgctttcctgcctgtttatgcatgtaattaacaatataatgaattctgtggttcggttgccagactttgtttccagaggctgaaatataccacagtggttccagaatccattccagggtggttttccctccttgtccccgcaactctgtgagtatacagctgggcagacaagcctgactcatagttcttttgaggaaagaggctccaacaggttctttcctgtctaagctgcagtctcagtgcagggggttttgttagtgaaaacaaactgcctttccagccacaggtgattggggtcaggacacaatgggccaagcagccctgtgtgggctgcgcatgagaagaccagccacgtctcaggaggcctgagtgtgagggcctggggcaaactctgcccactgaggattctaaacccggtggtggcaggtcaaaccatatttccccacttacaggagaaatgcactgagtgggccaggcgcagtggctcatgcctgtaatcccagcactttgggaggccgaggcaggtggatcacctgaggtcaggagtttaagaccagcctggcccacatgatgaaaccccgtctctactaaaaatacaaaaattagccaggcgtggtggcgcacgcctgtaatcccagctactccggaggctgaggcaggagaatcacctgaacctggaaggcggaggttgcagggagctgagatcacgctcactgcaacaagagcgaaactccatctcaaaaaaaacaaaataataatgataaaaaagaaatgcactgagtgaacaaagataaggcagctcagggacccacagcctggggtctgaacagtgctgagcaccttttccggttctctgaggggctgactcaacctggctgttgaaggggtgacctcctgtgtgcactcatgtcatggagttctttgccgcaaccttgccacagccactgaaggtaccactgctgtctcctgttggcctgctcagaggttctctctagatttctgctctattaagttcaagctccagcccaggggagagccgccagcctcagagacaccacagcccctttcttaattatctgtttctaaaatagcaaacaggctgtgtgagtggagagagacagaattatgtttattaaattataatttatatacagtaaatgatgtacatctttttcagggtacaggtctagaattttgactaacacacagttgtataatcaccaccataatcaagatatagaacatttccatcaccctaaaaattcccttatgtccctttgtcattaacccctccctctgtctccagcctctggcaaccactgatctattttctgtctctgtggttttgccttttcccaagtgttgtattaatgacaaggccttcattaacatccttatttaaaccaacatgtgccctgcccaactttctgctggcacatctcaccctcatactttgcccgatttttttttcaggacacccacaataactgaaaataaattattatttacttaattactctctctcattggaatgtacgctctcactagaatgtgagcgtgagaaccttgcgtgcttgctgctagatctccagcgttcaggacgctgcctagtgtcttgttagtgttgggtaaatattttttgaatggaccacaaaatgaatgaggatactggaatttccggggaccctctccatactcaggtagaccttgttaaaaagagattatttttccccacaaaaatgtgttaatctaagaattgctgtgttgccaaagtagatgattatctgccagtaacacaattaggggtaattaggggccaagagcggtggctcacgcctgtaatcccagcattttgggaggctgagtggatcacttgcgcctaggagcttgagaccagcctggccaacatggcgaaaccccttctctaaaatacaaatacaaatacaaaataaatacaaaataaaaaatacaaaaattagctgggcctggtgatgtgtgcctgtagtctcagctactcaggaagccgagttgggaggattgcttgagcccaggaggttgaggctgcagtgagccttgcttgtgccactgcactccagcctgggcaaaagagcgagaccctgtctcaaaaataaaaaaaagaaaagaaagataagtagttaggctgatccaggttatggattgtcttttaagtttactttctggctgattaggttacctagaatagaactggcctgaagtgactaacatggaaataatgatagtaactatttcataaggtggttacaacaattaaatgttacaaattaggttcagtgtttactgctcagatgatgggtgcaccaaaatttcacaaatcaccactaaagaacttactcatataacctgttccccaaaaatctatggaaataaaaaaaatttttttaaatgatctaatataagtgaagcgtttcatgcagtggttctcacctgggagctgttttgtcaccccagggacatctgacaatatctggaaacattttttttcttttgtttgtcaaaactggggcggggaggccaggtgtggtgttcatgcctataatctcagcgctttgggaggttgaggtgggatgattgcttgaggccaggggtttgagaccagcctgggtaatatagtgaggccccatctctacaaaaatttaaaattagccaagcccggtggcacatgcttatcgtcccaactattcaggaggctgaggtgggaggattgcttgggcctgggagttcgaggctacagtgagccgtgatcatgccagtgcactccagcataagtgatagagaccctgtcttttaattttgttttttttaattaaaaaaataaaaactggggtggagagggctgctactggaaccagctgttgaacatcctacaatgtacaggatatcccgcacaacacagaatgacctgtcccaaaatatcaatagtgccaccagtgagaaaccctgggttagtgcagcatcaggcacatagtaaaaactgtattggtgtttgctatgattattattttataagtggcccttcttgacaaatgttcccacacagtctgacagtggaggtataatggagtgttgggttgagagttaggtttgacacctagcttcaccctttattaactatgtgacttttgagcccttacttgacttcgctataccccatattctttgtctatccaattggaataacagcaactccctgagagagttgctggggaattggataaaataattcatacaaaacattcaacactgcagtagcacatagtaaatgttcagtaaatgccatcgattgttgctgctgctgttgatccaataaagacctttccacagaatatagtgaagggatagaggacagtttcaactaggaaaaaaaattactcatataaagtatataaaagcgtatatttcgtatattaataaatatgtagaagttaaatttaaactatcctttttaaggctgctatttataattttctaaaaagtatattgcttttgctttcctagggtagagcacctccttgatataaaagatcctctcaattttaaacatttgtatctaacacagaatgcataattatttaattaagacgtttggtcttgattagaaatagaaacacattaaagtatttttgagaacctggatctcagatatgaaatataagacttaggaaagttaaacactagcgtagtagcaacaacctcttgtgtttgagattcgttaatctcttattccttcattgaaataggaaggagaagcttgcagtgggtaagtaattgcagatttgtagccatttctagcagttcctagaatcccctttataatctaatatttgtgttttaaaaaaataatctaatatttgtaaaagtgctttggaaattgtaaaacaaaactatggagatgtgggccattagtattatcatcaaccctaacaggatgttagagagtcagatgttgccacttcaagggagatgaccgagttttggtgcatttcaggaagccaaaatcaggctgcaagtaaactttgtatttaagaataaatgagaccgggcttggtggctcacgcctgtaactgcagcactttgggaggctgaggtgggcagatcacgaggtcaatagatcgagaccatcctggctaacatggtgaaaccccgtctctactaaaaatacaaaacattagctgggcgtggtggtgcatgcctgtagtctcagctactcaggaggctgaggcaggaggatcacttggatctgggaggcagaggttgcagtgagccaagattgcaccactgcactccagcctggagacagattgagactccgtttcaaaaaacaaaaaacaaaaacaaaagaataaatgattaaattgataaactatacattatttcgtgtaatattagaaatacaatgaagaactgtgtttctctgcataaaacttttaggtacgtgttttatactctgttacaaaatagttgggtggaaaaactcccaccatatacaaaatgaaaaggcaaatgacaacctgggaaaaatgtttgcaaaacatatgcaaagatttcatattcccaatagagaaaaaagtcttatagatcaacaggaaggatataaatgctgcaataaaagacatgaacatgcaattaacaaaagaaattcaaattgccagcaaatattaaaaatgtttagaattactgtcaaccaaacaaatgcaaattaaacaatacttttttttccttttaaattggcaatggttaaaatgtttctatcttctagatgtactattttctgaacaccagaattcagcacagcacctggcaccaaacaggatcgacaatcatttaataagtaaatgaatgagtcatgtgcatgcaacctagacatgactgacattcacccttttatttctttctctcttgagaagggatctcactctgtcacccaggctggagtgcagtggcctgtcatggctcactgcagtctcaaatttctgggttcaagtgatcctcagcttcctgagtagctgggactacaggagtgcaccaccacacctagctatattaaaattatttttgtagagaggagggcttgctctattgaccagtctggactcaaactcctgaactcaagtgatccttctgccttggcctcccaaagtgctgggattacagatgtgagccacttcgcccagcccaccgttttatttttgtgagtatactgtgggtttatatttataaattgggtggggagaagatccccttgcttcttgagatcatttatttacctttcttgcttagaaagacaaataaatggtctgaaagtgcttatttggggggtagtttttttttttttaatgggaagtgactcaaaagtgaagtctcagttcaagacctttttttttttttaagtcttactcaaaaggaagtgagtatgaggtgaactgcattaacctaaagtgctgcagagataaacttaaagcaggaagcaacataccatgaatgtactgcaagggaacacatttgtgtcatgtgaagagacatgacaaaaacagccctccttaaattatttgtggcaatagtgatcacattcattttaattttgccggaatatttcaagacaccgaaaggtgagtatataattgtaatctagctttcctttcttaatttaaaaaaattagtgtcagctagtggttacagaaaagatcctctttttggacacatgctgcataggctgaagttctagatctgaaaaactaataaaacaagattgcaattttagttgactgttatatagtacagtaacctaattcatagtacttaattatcatagcatacctaaaaatgaaaatatttaaaatctgtagtctagatttcagacattgagattacaataattgcatcatgattttgctctttgaaacactttcttcaaagcagtttttttttagttttttttttttttttttttttttgagatggagtctctgtcgctcaggctggagtgcaatggcctaatcttggctcactgcaacctctgcctgccggattcaagcaattctcctgcctcagcctccgagtagctgggattacaggcgcccaccaccatgcctggctaatttttgtatttttagtagagacacggtttcaccatgttggccaaactggtcttgaactcctgaccttgtgatccacccacctcggcctcccaaaatgctgagattacaggcttgtgccactgtgcctggcccaaagcagctttaagtatgctttttacattttggaattctttaatgaagaaagtgatatttattgtgttaaaaatgctagaattccctttactacaactatttcacacagataacttaccgtcaccttttgacaagaaaaagcgtttatatattttgaaaatacaatcaaaataaggtgagtggaaatttaaacagatgtatgtgtatgtatttgtaactggagaaaaatggaacaaaattaactttgtgaacgtttcagaaaattgtgatataattgctgaaacctagattaggaaaataaataggtataaatttaaactattttgatgttagcaaaggacttgaaaatttattaatgtgaggttcaaatggtaattgtgctccctagcatttaataagaagaaaaggtgaaaagaaaaggctgtattctatcattaaatagtctttatatgaatttgattaaaatcagagaaaaactcatatttgattatttgctgcaatgaatatttattgttgcatatatgtaatgctaaatagccagataaaaatatttttgctaattatatttgatgacatatttcagtgattatttgatgttgcatttacatgatgctaagtagcgagttaaaaatatttttgctaaataaacactatgactacaatttggttttctggcattatgttacttagatgaagcaatcatagcacatattttcagtgcttgattccactgggtgaaaatgtgttataaagagaatagttagaataaagataatctatttttaagatattgtgggctgagagtaagctcatttaatagttatccggagtaggttctatctatatatctatctagctagctagctagctatcgatctacacctagcacctcttaaaaatcaggttggatctaataaaaaccaggtaatcatcccaaaaatgacttaattaactattggttagtattttatgagaactggtgactacaggagcatgttaaaggttttcattttggggcagacatgtagttcttttagtttttgtttctcaaagtgagaagcatggccttctggggcagtggtgagcagaaagaagatagatgaagcacagagaaattcttagtgggggacagatgggagccccttctattggtaggtagaagaaagagctcttataaaatccatcttagccaaacttccttggcctaatagtaatgtgtcagttcttcttcatcttgtcaatagtcaaccatcatttataatgatgtttgttctcttgctttcaaaactggttatatcagctcccaatactacctttactgccttcccaaacttaaaatggctgtttctcttctcctggtccaagaacagcatagataatgctccaaactctttctgggttgatgggttgtttttttttttttaagagacagggtcttgctgtgttgcctaggctgactcctgggctcaagcaatcctcctgcctcagtccccaagcagctgggactacaggcacataccaccacactcaggtggatttattggggaattttgtttcaaaggaaccctacttggggccaacaaacaaaaatgttcaaaaaccactgtcttcttttacattannnnnnnnnnnnnnnnnnnnnnnnnnnnnnnnnnnnnnnnnnnnnnnnnnnnnnnnnnnnnnnnnnnnnnnnnnnnnnnnnnnnnnnnnnnnnnnnnnnnnnnnnnnnnnnnnnnnnnnnnnnnnnnnnnnnnnnnnnnnnnnnnnnnnnnnnnnnnnnnnnnnnnnnnnnnnnnnnnnnnnnnnnnnnnnnnnnnnnnnnnnnnnnnnnnnnnnnnnnnnnnnnnnnnnnnnnnnnnnnnnnnnnnnnnnnnnnnnnnnnnnnnnnnnnnnnnnnnnnnnnnnnnnnnnnnnnnnnnnnnnnnnnnnnnnnnnnnnnnnnnnnnnnnnnnnnnnnnnnnnnnnnnnnnnnnnnnnnnnnnnnnnnnnnnnnnnnnnnnnnnnnnnnnnnnnnnnnnnnnnnnnnnnnnnnnnnnnnnnnnnnnnnnnnnnnnnnnnnnnnnnnnnnnnnnnnnnnnnnnnnnnnnnnnnnnnnnnnnnnnnnnnnnnnnnnnnnnnnnnnnnnnnnnnnnnnnnnnnnnnnnnnnnnnnnnnnnnnnnnnnnnnnnnnnnnnnnnnnnnnnnnnnnnnnnnnnnnnnnnnnnnnnnnnnnnnnnnnnnnnnnnnnnnnnnnnnnnnnnnnnnnnnnnnnnnnnnnnnnnnnnnnnnnnnnnnnnnnnnnnnnnnnnnnnnnnnnnnnnnnnnnnnnnnnnnnnnnnnnnnnnnnnnnnnnnnnnnnnnnnnnnnnnnnnnnnnnnnnnnnnnnnnnnnnnnnnnnnnnnnnnnnnnnnnnnnnnnnnnnnnnnnnnnnnnnnnnnnnnnnnnnnnnnnnnnnnnnnnnnnnnnnnnnnnnnnnnnnnnnnnnnnnnnnnnnnnnnnnnnnnnnnnnnnnnnnnnnnnnnnnnnnnnnnnnnnnnnnnnnnnnnnnnnnnnnnnnnnnnnnnnnnnnnnnnnnnnnnnnnnnnnnnnnnnnnnnnnnnnnnnnnnnnnnnnnnnnnnnnnnnnnnnnnnnnnnnnnnnnnnnnnnnnnnnnnnnnnnnnnnnnnnnnnnnnnnnnnnnnnnnnnnnnnnnnnnnnnnnnnnnnnnnnnnnnnnnnnnnnnnnnnnnnnnnnnnnnnnnnnnnnnnnnnnnnnnnnnnnnnnnnnnnnnnnnnnnnnnnnnnnnnnnnnnnnnnnnnnnnnnnnnnnnnnnnnnnnnnnnnnnnnnnnnnnnnnnnnnnnnnnnnnnnnnnnnnnnnnnnnnnnnnnnnnnnnnnnnnnnnnnnnnnnnnnnnnnnnnnnnnnnnnnnnnnnnnnnnnnnnnnnnnnnnnnnnnnnnnnnnnnnnnnnnnnnnnnnnnnnnnnnnnnnnnnnnnnnnnnnnnnnnnnnnnnnnnnnnnnnnnnnnnnnnnnnnnnnnnnnnnnnnnnnnnnnnnnnnnnnnnnnnnnnnnnnnnnnnnnnnnnnnnnnnnnnnnnnnnnnnnnnnnnnnnnnnnnnnnnnnnnnnnnnnnnnnnnnnnnnnnnnnnnnnnnnnnnnnnnnnnnnnnnnnnnnnnnnnnnnnnnnnnnnnnnnnnnnnnnnnnnnnnnnnnnnnnnnnnnnnnnnnnnnnnnnnnnnnnnnnnnnnnnnnnnnnnnnnnnnnnnnnnnnnnnnnnnnnnnnnnnnnnnnnnnnnnnnnnnnnnnnnnnnnnnnnnnnnnnnnnnnnnnnnnnnnnnnnnnnnnnnnnnnnnnnnnnnnnnnnnnnnnnnnnnnnnnnnnnnnnnnnnnnnnnnnnnnnnnnnnnnnnnnnnnnnnnnnnnnnnnnnnnnnnnnnnnnnnnnnnnnnnnnnnnnnnnnnnnnnnnnnnnnnnnnnnnnnnnnnnnnnnnnnnnnnnnnnnnnnnnnnnnnnnnnnnnnnnnnnnnnnnnnnnnnnnnnnnnnnnnnnnnnnnnnnnnnnnnnnnnnnnnnnnnnnnnnnnnnnnnnnnnnnnnnnnnnnnnnnnnnnnnnnnnnnnnnnnnnnnnnnnnnnnnnnnnnnnnnnnnnnnnnnnnnnnnnnnnnnnnnnnnnnnnnnnnnnnnnnnnnnnnnnnnnnnnnnnnnnnnnnnnnnnnnnnnnnnnnnnnnnnnnnnnnnnnnnnnnnnnnnnnnnnnnnnnnnnnnnnnnnnnnnnnnnnnnnnnnnnnnnnnnnnnnnnnnnnnnnnnnnnnnnnnnnnnnnnnnnnnnnnnnnnnnnnnnnnnnnnnnnnnnnnnnnnnnnnnnnnnnnnnnnnnnnnnnnnnctgcctagtcttactccattcgtttcttgtccttttttttcattttttctcatgttctattcactttaatttctaagataaatattataaaataatttttacttataaattattcactgataccctgtctttaacatgtgaaatgaattcaaaaggaatcttaatgagaaataatatactcatgatgtttaatagatttgatttcgaaataataagccctctgaagtcctaagttaaaaataaagcaacttgtttgataatttttcatcaagaatgtatctgagtctctgagtaattattagtaggaatattccattatcacaattacacagtataagctatttagtctaactttaccaaaaaagggagctacttcaacactgtgtgagacttttaatgggtttgcattgggtatgcactattagcaagataacctattttacagcagtgttttttaacctttccatttatttgaaaggcagctaagatatagtagttaatataatggtttgatgcatttatattacatgtagataatggagatacaaaagggagtggtggatatattttgattcagagcttcttgcaattaagggagctagcttactcccaaataagaaactttccaacctgtttttgttggacttacagtgtttaagacagaacttggctaaccctcatgtaaatcccagtgatcttttatttatttattctttcacctgtgctagaaacctggggctacaaaaaggaaagacaactctttgatcaaggagttttcagtcgggaggacaactgactggcaaacaactaaataaaatacaggaattaactgaaacagggatgtaaacaagatgcaatggaaacataagtattgcttccacgtcagtctttgggaggacgttccttgtatttccatttgcaaagagaaataaataattgtcagagttcaaatgatcacctagtattccttcttacctgcttgcaaaagcacttttcaagagaagaaatgatgacgattattaaataaaatattctcatatcagtatatcaatagttcctgaaagtggcaattgcagtgagtcacacaagtgtactcccagtgatttgtggcaatacaggataagaatagcacagatgaggctgggtgcagtggctcacgcctgtaatcccagaactttgggaggccgaggcgggtggatcacctgaggtcaggagtttgagaccagcctgaccaacatggtgaaaccccgtctctattaaaaatacaaaaaactagctggggccaggcgcggtgtaatcccagtactttgggaggccaagctgggtgggtcaattgaggtcaggagtttaagaccggcctggccaaaatggtgaaaccctgtctctactaaaaaattaaaaattagccgggcatggcagtgcacacctgtcatcctagctactctggaggctgagacaggagaatcacttgaatccaggaggcggaggttgcagtgagccgagattacaccactgcactccagccttgtggacaaagcgagacttcttctcaaaaaaaaaaaaaaaagaaaaagaaaaaagacagaaagaaaaaggaaaattagctgggcatggtggtggcatgtgcctgtaatcccagctactctggaggctgaggcaggagaatcgcttgagcctgggaggcagaggttgcagtgagctgagatcaccccattgcacttcagcctgagtgacagagcaagactccgtctcaaaaaaaaaaaaaaaaaaaaaggaatagtatagatgaaaacacctcagacctaattttatctgttttgacttcctcactttcttttaagagccaaactgacataaactctgtttaccagctttcatttccccttctctttcacgctttgtgaaggaaatggtggtataatgaacagtgaaattgaagaaaacaaaggataaagcaactataggataaactgacataatatgagcatatgttcacagtgtttaagtctatattataatgaccaccacatcaagggtaattgcaattaatttcctgaaagtgttattctagttctcaaaaatgaatgctctttttcttattcataaatatttaatcagtaatccccaataaggccttatgactatttaaacaatttttttattttaacaaatacatttacatgtgccagtaatatgccaagtactttgacatatattttacaaaataataattcacagtaatgtgtcaaatatttctactcattcatggcgcagcatcattctcaagagagaatgttctgaaaatctttagaaagaaggaataaaactagatggataaatgtactttgtggtaagattttgcttctttttaaaaatttttatttatttatttatttttgagacaacagcttactttgtcacccaggctggagtgcagtggcgtgatctcggctcactgcaacctccaaccccagggttcaagccattttcctgcctcagcctcccgagtagctgggactacaggcacgcaccaccatgtccagctaatttttgtatttttagtagggatggggctttgctatgttggccaggctggtcttgaactcctgatctcaagtgacccacccgcctcagcctcccagagtgttgggattacaggtgtgagccaccacacccagccagattttgtttcttattgaattttctgaatcattacaattttaaaatggccactaatggacacaatattttcatatatatattttaggcactaggtgttggcaaaaaaatgtgttaaatataacgcttttcatcactttgacagaactggctttattctctaatctgttaggttgcaatacctaccaacaatccttgcttagggtgctttctaactgcttgtctcattgttttggtggataaatgctcccttagtatatctcttttgctttttaattttttaaaaaaattttttaagagagacagggtcttgctttatggcccaggctggactccaattcctgggttcaagtgatcctcccacctcagcctcctgagtagcatatcttttttgctttaatagaaaaaaaagactttctctaaaacattcatatggtgatatatcttccccttacactgttctgtttcttttctcctatcacttatattttatcacctatatgatttatttattatgcattttttaaaattatctgatttctccaaatagaatgtaagctccatgaaaccgaggttttgtctgctttgttcactgatgtgtttcaagcaattaagagagtgtctgtcatattaagggcactcaatgaatatctgttgagggagcaaacttgctgaatcatactgttaaggaaatcaaaagaaaaccttgaaggaggcatttctcatctgacgttcacaaacatcttgtgatttaggcaggccaagtgttatcctcatatttttgaaagattaaatttcatcacaaacctagagattttaagttgtgctagcgtgtgaaatttattttgcagaatattttacttgaaaggtatgtgtctttttaccctgagtcattttcctgccattttctttatctacagggaatttcataatattcatttgcttctcttattttgacaagtaaaatgagcagtctcctatgtctcaaacctgcctttcaaatattgctatggtatgtcgaaagttatcccaaactttgctccctgcctccagcaaacatttcaaatggtctttcccaaatatcctatgaataaatccgtagtcccttgctcctgatctggctgacactacagatatatcacccatacacaatatgatatgtttttccctcttttctgctcaatattaccagagagccttcaatgattggcctccaaattgaaatataatctagtttttgctattgaagtggataatctttttgagtttattccaatctttttttttttttttttttttttgagacagtcttgctctgtcacccaggctggagtgcagtggtgcgatctcagctcactgcagcctccgcctcccatgttcaagcgattcttctgccgcagcctgccaagtagctgggattacaggcgcccccaccacgcccggctaatttttgtatttttagtagagacagggttttgccatgttatccaggctggtttcaaactcccgagtttaggcaatctgcccacctcagcctcccaaagtgctgggattacaggcatgagccaccgcacccggcctattccaactgttaaagaaggcagacctgtgaccaaaggaaaacatcatatgttaatgaatgtctctgtaaattaggcagctaaaccataaggtttctcctatcctgacagctaatatttttaaattgctgaattatgctatagaataactaataatgtgaaagatttttagaaataatcgactatgtttttaacaggcataatttacatacgataaaatggaaagatgttttttaaaaaacttttattttaagctcaggcctacatgtgcaggtttgttatataggtaaatgcatgtcactggggtttgttgtacagatgatttcatcatctaggtattgagcctagtacccattagttatttttcctgatcttctctctccttccaccctctaccctctggtaggccccagtgtctgtttttcccctctatgtgttctcatcatttagctcccacttataattgagaacatgtgatacttggttttctgttcctgtgttattttgctaaggataatggcctccagctccatctatgtttctgcaaaggacatgatctctttcttttttatggctgcatagtattccatggtgtatataataccacattttctttatggaaagatcttaagtgttcagtttcatgaattttgacattcgtgtgcacctgtgtaactactatcacataccagatacagatttacatctccccagtaaagattcctctggctcggctgggcatggtggctcatgcctgtaatcccagcactttgggaggccaaggtaggcagatcacaggatgtcaggaattagagaccagcctgccaacatggtgaaaccacatctctactaaaaatacaaaaattagctgggtgtggtggcacgcgtctatatccccagctactcaggaggctgaggcaggaaaatcacttgaacccagggggcggaggttgcagtgagccaagatggcgccacttcatggcagcctgggcggaacagcgagactccatctcaaaaaacaaacaaataaataaacaaacaaaagattcctctggctctttcctttcaaatctcctccagcatccccaaggcaacatctgacctgtgtcaccataaattggttttgtctcttcttttattttgtgtaaatggactcatcacacagtaaatatttttggtctggcttctttttttatttttattttttattttttaaacggagtctcactctgtcacccaggctggagtgcagtggtgctatcttggctcactgcaacctctgcgtcctgggttcaagtgattctcctgcctcagcctcctgcgtagctgggactacaggtgcccaccaccatgcctggatttttttatttttattttttgtatttttagtagagatgggtttcaccaagttggccaggctagtcttgaactcctgacctcaagtgattcgcccaccttggcctcccactgtgctgggattacaggcgtgagccaccatgcctggcctggtctgggttctttacttagcatgtttttgagattcatccatgctactgagtgatttagtagctcctatctttttgttgcaaagtactccatcatataaatacacaacatttgtccctttatctattgggttatttcaagtttgggctattataaatatgctgctatgaacattattgtacaaatgtttgtgtcagtatatgtttttatttctattcaataatgctctagttgtggaatacctgggtgtcttagtcagcttgggctgctgtaacaaagtgctgtagacggagtaacttgtaaacaacagccttcacagttctggagtttggaaatccaagaccagtatgccagcatggttgattctgatgagggtcctcttctgggttgcagaatgctgacttttctttgtattcttacaggatggactagttacctctctggtctcttcttataaggacactaatcccatccattagctctccactctcatgacctaattacctcccacagaccccaccttcaaataccatcatattggaattttaggggtacacaaacggttagtccatttcactgggtacgtttaattttacaagaagctgacagatgtttctctaaagtggttgtactagcaatatttctagtagcaaaaaattctcattttctctagtttatatttaatatactgaattaataacacttagaatatgtatagtcaaagaaataatctacatttcttccaaagttccctgacaactagttaatgaggtcttgggaaaatgtgagttgacctagagtagcctctggtgtgcctactatctgtcaaataatgaagattttaatttacattaaaattttatggaaagatattctacaaataagttttcacttattggtagaggtcaacggatagttgagatttcttttcttgcagtcatactctgaaaaatactcctgggacaaaatatctaaaaatgtgaaataaaatgtatttaaaactttagaaatgtagagttaaactgataagacaataagactccttggaggcagaaaatgagtaggaattataaatacgtatggctaagcaagagtgaacaaatttgtgcctcaggagcatttgcaaatctctggtggcctggaatttcagtttcactgggtcatacgtcaggagacagaaggcaaagtgtaagactgagatatgactgagatactaaaaagtgatatgctccataaaacagtaatctagcacaaattatgtctggttttgaggaaatttgtctgtcttcactttggctatgggtggagaaaggaaaaagagtcctttgagagtttataaacacagttggccataacttggatgttgagaatcattacctgtgacgtgtgaaaagtccaatccaggaatgtagttaaagtcactttgggttaatggtgccattagacactcaccagaggaaaacaccaatcctctctggaggaaaacatctttacaccattcctcaaataatttcccaaagtaaaattccaaggaacaatagctattatcaaaaatgataaaacacgtgaagactcaatggacaagaatcaacagaaacaacaaacagcagaatcggatcttcaaagaattccgatattggaattatgagatataaaatagaaaatatttagcttgtttcagtacagaaaatattacatcaaaaagtatgagtaagcacagaagaatgtaatcagactcatttcacaccatgtacaaaaaccaattcaaaatggattaaagacttgaagacctaaactgtaaaactactagaaggaaacatagggaaaaatatcaatgacattgttctaggcaattatttttttggttatgacccataaaacaggcaacaaaagcagacatatacaaatgagattgtatcaaactaaaaatcttctgcatagcaaaggaaatgagtgaaaagaaacttacggaatgagagaaaatagttgcaaaccatatatataagggtttaatatccaaaatatataaggaattcagacaatgcaacagcaagaaaataacctgatttaaaaatgggcaaaggatagtgaagagttatttcttttttacttttttcttttttcatttttttcttttcttttctttttatttatttatttttttttgagacaaggtctcactatgttgcccaggctggaatgtagtatggctcactgcattcttgacctccagggctcaagcggtccacccacctcagccccctgaatagctaagactgcaagtgtgggtcaccacactggctaatttttaaattttttttgtagagatggggtctcactatgttgcccaggctggtcccaaactcctgggctcaagcgatcctcctgtcttggcttcccaaagtgctaggattattggcatcaaccactgcatcaggctgacatttcttgaaagaagacatacaaatggccaatacatatatgaaaaaattctcaacatcgctaatcatcagggaaatacaaattgaaattttatgaaaatacagtgaaatattatctcacacccaagatggctattatcaaaaagacaaaatatagcaagtgctggtgaagatgtggagaaaagggaacccttgtatactgttgtgggaatgtaaaatagtacggccattatgacagacagcataaaggctcctcaaaaaattcaaaattaggctgggtgcggtggctcacacctgaaatcccagcactttgggaggctgaggtgggcagatcatgaggtcaagagatcgagaccatcctggccaacatggtgaagccccatctctactaaaaatacaaaaattagctggacatggtggcatgtgcctgttgtcacagctactcgggaggctgaagcaggagaattgctcgaacgggaggtggaggttgcagtgagccgagatcatgccacttcactccagcctggtgacagagtgagactccatctcaaaaaaaataaaaaaaattcaaaataagaactactaataaggcacaatgacatgcacctgtagtcccagttacttgggaggctgagttgggaggatcgctggaagccaggagtttgagagcagcctgggcaacatagtaggatcctgtctctttaaaaaaaagtagaactaccatatcgcccagcaatcccactcctggttatatttgaaggaaaggaaatcagtgtgtcaaaggatctctgaactcccatatccactgcagcattactcacaatagtccggatgtggaatcactctgaactcccatatccattgcagcattactcacaatagtccagatatggaatcaatgtaagtgtccatcagtgaatgaatggataaagaaaacgtggtacatatacacaagataatactattccaccttaacaaagaagaaaattctgtcttttgcaacagtatgaatgaatctgggggatactatgctaagtgaaataaaccaggcacagaaagaaaaatgccacatgatctcactatatatggagtcgtaaagagttgaactcacagtggcagagaatagaatagaatgatgtttaccgtggacgacagggtggggtgaggggaatggagagttgttggtcaaaggatacaaaatttcatttagacagatgaataagttctggagatctattgtatggcatattgactatagctaataataatggattatatacttgaaaattgctaagagagtaaatgttctcgccacacacaaacgaaaatggtatgtgagtgatggatatgttattaggtttgatttaatcacctaacaatatatatatctcaaaacatcacattgtataccataaatatatatataatttttgttagttaagtataccttaataaaacttggggaaaggcacctgaaaatatatgaagtttaaagcaaaatgtaaggtactgtgattgggaaaatagcaaaaatagcaacaattcgtacacacaaagttaatagggaggacaaacagagtcgtttattcccccagcctaaaaataatataaaacaaatatgtggggagatccaatgctctgccacattttgtgattctaaaaaacaatatgagcaaggaacaaagactattaaaagttaccaggcagatttgaaaaagaaccaactggaagttctaattgtgaaaaatataataaattagaaatgcaaggaatgaaatgaacagattagatgcaactaaataatgaattagtgaactggaatagagatctaaagaaattacctagaacatagcacagaagttaagagacatggaaagcaaagggagctatttctaatcaaagctgcaaaggatagaagaaatagaatagggtaaaggcaatatttgaagagacaatggctaagaaatttacagaatcattgaaagacgtaaatcctcaaattcaggaaacccacaaatcccaagcaaaataagtgatgagaaattctgcagagcatgaaaactgaagaggtttttttttttttttcttttttaagatggagtctcgctctgtcgcccaggctggagtgcagtggcgtgatcttggctcactgcaacatttgcctcccaaattcaagtgattcttctgcctcagcctcctgagtagctgggattataggagcccaccaccacacccagctaatttttgtatttttagtagagacggggtttcaccatgttggccaggctggtctcgaactcttgacctcaggtgatctgcccaccttggcctcccaaagtgctgggattacaggtgtgagccatcgtgcccggccaagagatctttaaataaccagggataaatgcagattgtctttaaaaagtttaaaggaacaatagtctgatagctcatctcttgaaaacaacaatgaaaatcagaaggcagtgaaaaatgcctgcaaagtgctgaggcaaaatttttgttgacctagaattggtgagatgtatattttcaggtaaacaacacagagagtttacaatcatcagaccctcagtgaaagaacttctaaataattagctttaggagaaggaatgtaatcccagaaggaagggcagagatgcaagaagaaatggcagggaaaaaaacctcaacaacaattataaacatgtgagtaaatctaaacaaatcctgaaaatattagatgcataaaatttaaaaactcaactaatttgtatgtcagtgaaaaaacaagatagaaccaaaatgctgtataaaagtagcatttaagtcaggaaggagatgatccgagttaaagtatcctaagacccttgtattgtttgagagaggttaactgttgattgactttaggctttaagaatgcatgttaaaaattactatggtaactactaaaataatagaaatatagtatctaacctcacataactaaagggaaaaataatggaatgagaaaaaaaaatcactgaatcaatttaacagccagaaaggcaagaaacaatagaaagcatggtacaaataggaagcattaataatatgatataattaaatctaaatataccaatgatcccagtaaatgtaaatgggcaaatctatccaggtaaaaagacaaaaaattatcagactagattaaaaaagcaatttccggaaatatgccatttaaaacagacctatctaaagcattaagataaaagtgaaaagatgagaaaaatatacggaacaaatagtaactgaagaaagcacatgccatggtattaatgtaagattttaagattaacatcattactagcaataaagaaggtcaggatatatggatagaagtttcaattcacaagaatatgcatcaattctaaatttatatgccccaacaaagatagctttaaaaagacaattataaatccattatttagtgggagattttaaacatacttcccagtcataaaatacaaccatgtgaagaataggaatatagacaattcaaacaattcaaatagctagttttatctaatggatgtatttagaatattgaactcaacatctggaacacatattcttttcagggaataaaaatacatacttgggctgggtgcggtggctcacacctgtaatcccagcactttgggaggctgagacaggtggatcacggggtcaggaaatcaagaccatcctggccaacacgatgaaaccccgtctctactaaaaaaaatacaaaaaaaattagccaggcgtggtggcgggcacctgtagtcccagctactcgggaggctgaggcaggagaatggtgtgaacctgggaggcggagcttgaagtgagctgatatggtgccactgaactccagcctgggagacagagcgagactctgtctcaaaaaaaaaaaaaaaaaaaaaaaagaagaaatacatacttgatatggtttggcagtgtccccacccaaatctcaccttcaattgtaataattcccacttgtcaagggtgggaccaggtggaggtaattgaatcatagggtggtttcccccatactgtgtcttgtgatagtgaataaatatcatgagatctgatggttttataaatgggagttcccctgcacaagttcgcttgcctgccaccatgtaagacatctctttgctcttccttcatcttctgccatgattgtgaggcctccccagccatgtggaacttaagtccattacacctttttcctttataatttacccagtctcgggtatgtctttattagcagcgtgagaatagactaatacaataccagactataaaaacaagcctcaatacatttcaaacaatctttaatatacttctctgactaaatgaaattaaattagattctagtaacaaaaagaaagctaaaaataggtaatatatttggaaatttagaaaattcacttctaaataacctatagttgagaagaaactataatggagaatagaaaatactgtaactgaatgattaaaaaatactatctgtttaaacttatgcaatattaccaaaacatataactttaaatgcttatacctaaaacatcagaaaaagaacaataagataaacccagaaagtaatggcaggaaataataaacacaggagcaaaagtcaatgaacttaaaagaatagatacagaaaggatcaataaaatcacaagttggttctttctttcttctttttttttttttttttaggcagagtcttgctgtgttgcccagcctggagtacagtgatgtgatctcagctcactgcaacctctgcctcccgggttcaagcaattctcctgcctcatcctcctgagtagctgggactacagactcacaccactatgcccggctaattttttgtattttagtagagatggggtttcaccatgttggctaggctgatcttaatctcctgacctcgtgatctgcctgccttggcctcccaaagtgctggattacaggcgtgagccaccacacccagccaagctggttattttaaaggactatttgtatggataaaccactggaaagattcatatgttaatgtattagtccattttcatgctgctgacaaagacatacatcatttataaacaaaaaagaggtttaatggactcacagttccacgtggctggggaggcctcataatcatggtggaaggcggaaggactttgtacttggtggcaggcaaagagggaatgagtgccaagcaaaagggggtttccccttataaaaccatcagatctcatgagactgttcatgagaacagtatgggagaaacagcccccgtgattcaattatctcccactgggtccctcccacaacatgagggagttatgagagctacaattcaagatgagatttgggtggggacacagccaaaccgtatcagttaatttcttagggctgctgtaacaaatgatcataaacttagtggcttaaaatgacacaaatgtattgtctcacagtataggttagacattcaacagaggtatccccgggctaaaatcaaggtatcagtaagactgtgttccttttggaggctctagactagaatccattttctggctgtttccagcttctggaagctgtctgaattccttggcttgtggcctccttccatcttcaaagccagcaatggcctgctgagtctttctcatattgtatcactctgacattgactcttctgctacccaattccacattcatgattacactggatccacccagataatccaggataatttcttcattttaagatcagctgattaacaacctgaattccatcttctgccttaattccactttgccatgttatgtaatatatttacaggttccaggaattaagatagggacacttattctgcctgccaaaactgaataataaaaaaaatgagagaaggtacaagtaactaatgttagaaattaaaaagggatataactacagacatagcaaaattaaagatgtaataagaggatattgtgaataatttatgtcaataaatttgaaacacaaagacacatatctaggaaacttacttaggaagcaatggaaagctcaagagttttacaacaattaaagaaactcagtccatggtttttaatcttctctgtttcagatgattttcacactagtttcagatgattttccaggcaattcctgccaaactttcaagaaacagaccaaacagataaatgtaattttatgtaatttttttcaaagcataaaaaagaggagacatttatttatttcttttttaaaaaaagatgaaaattttatttactgggaaattcttgctgatttttttttttttttttgagatggagtctcactttgctgcccaggctgtagtgcaatggtacaatctccgctcactgcaacctcagcctcctgggttcaagagagtctcctgcctcagcctcccgagtagctggattacaggtacacaccaccatgcccagctaatttttgtatttttattagagacagggtttcaccatgttggccaggctggcctcaaactcctgacctcaagtgatctgcccacctccgcctcccaaagtgctgggattacaggtgtgaactaccacacctggctcttgctgatttttgcataggggtgtgacaaaagcaacatcagaatttattgtgattctatctacagaaactggagaagatgatttcattggttcattaaacccctcaatgtcttctacctgcccttcctaacctttacattcaaaattatcttcctgcctatatatctgttagtcaatcatctttcttccattaagtttatgaaattcttcatgacatgatatggactttgacagtgctgtttttgatgtcgtaatacatggcagattgactcgtgataatatcacttatagcttattcaggggtcagtaaactatggtcttttacagcctcttttgtttaaaatggttgggaaataaagaatattttatgacataaaaattatattaaacttgaagtttagtatccataaataaagttttattggaatgcagccatactcatttttatatgcattttctgtggctgttttcatcctataaggtgagaattgtgtagttgcaacagagaccatatgacccacaaaggctaaaacatttactaaatgaccccttatagaaactaagttgcagaccatggcctatatatttacattacactacaattataaaatataagtatttgacagtatttaaacctttggatgaatgatcttacatagtgaaatgtataggtatatctacattacagatatatcctcttaatttttaccatttttcagttgactgttttagcttttttaaatacacacttttgtctgtaaataattataacaattggccgggcgcgatggctcatgactgtaatcccggcactttgggaggctgaggcgggtggatcatgaggtcaggagattgagaccatcctggccaacatggtgaaacccccgtctctattaaaatacaaaaaattagctgggcgtggtgaggtgtgcctgtagtcccagctactcgggaggctgaggcaggggaaatcgcttgaatccaggaggcagagttgcagtgagccgaaatcgtgccactgcactccagcctagcgacagagcaagactccgtcttaataaataaataaataaataaataaataaataaataaataaataaaccaattatgtcatactactctttttttttctttgttttctttttctttctttcttttttttttttgagacaggttctggctctgtcgcctaggctggagtgccgagtgcagtggtaagatctctgctcactgcagcctctgcctcgcaggctcaaaccatcctcccacctcagtttcccgagtagctgggactacaggcatgtgccaccatgcccggctgatttttgtattttttttatagagacgaggtctcactttgttacccagactggccgcgaactcctgagttcaagagacccacccacagtagcctcccagagtgctaggattacaggcgtaagccaccatgtccagcctcatactactcttttccaacacttccaagcattgtttccttcacttctttctttttttctttcctttttttttttctgagacacagtctcaatctgttgcccaggctggagtgcagtggcgtgatctcggctcactgcaacgtctgcctccctggttcaagcaattcttcctgactcagcctcccaagtagctgggattacaggcacctgccccacggcaggctaatttttgtatttttagcagagatggggtttcaccatgtcagccaggctggtctcaaactcctgacctcaagtgatctgcccgcctcagcctcccaagtgctgggattgcaggcgtgagccaccatgcccggtctatttttgtatttttactagagaccaggtttcaccatgttggccaggctggtctcgaactcctgacctcaggtgatccgcctgcctcgacctcccaaagtgctgggattacaggtgtgagccaccgcacccgaccttctccacctatttctaatcaatgttttctcctaattgctttggcagattttcctggcaaatatttatagggaaaatttcttgctttttcataactttgacataaatatttatagtgtttatcactaaaatatatttacatcagtatccttagtgctattgatattttggtctgagacagatagactttataatgtaagaatatttctcttttacaaagagaatatagtaatttgcaaataaatgtgatatttattacgtgattttgaagcatctagatgtagttcatattcttttagacccactgatgtaatgtatttcattaatatatttttaagtactatatcatttttaaattttagattcagagggtacatgtgcaggtttgttacatggatatattatgtgatgctgaggtttgggcttctaatgatcccattgcccaagtggtgaacatattacccaataggtagtttttaagcccttgcttccttccctcccttcccactttgggaatacccagtgtctgttgagcccgtctttgtgtctgtgtgtacccaatgtttagctaccacttataaatgagaacatgtggtatttgtttttctgtttctgcattaatttgcttgggataatggccttcagctgcaaccatgttgctgcaaaggacatgatttcaatcttttttatggctgaatagtattccatggtgtatacgtaccatattttcttttattattattattatttttgagatggagtctcactctgttgtccaggctggagtgcaattatgtgatgtcggctcactgcaacctctgcctcccgggtttaagcaattctctgcctcagcctcccgggtagctgggattacaggtgcatgccaccatgcctggctaatttttgtatttttagtagagatggggtttcaccatcttggccagactggtcttgaactcctgacctcgtgattcacctgccttggcttcccaaagtgctgggattacaggcatgagccaccactgatggattgattccatgtctttgctactgtgaatagtgctgtgataaacgtatgagtgcaggtgtctttttggtagaacgatttatcttcttttaggtatattcccaataataagattactcggtcaaatgacaattctattttcagttctttcagaaatctccaaactgctttccacagggcctgaactaatttgtatttccactaacagcatataaacttccttttctttgcaaccttgtgaatgtctgtgattttttaaataatagtcattctgactagtgtgaaatggtatcacattgtggttttgatttatatctctgtaacaattagtgatgttgagcattttttaatatatttgttggctgcttggatatcttgagaagtgtctgttcatgtactttgcccactttttaatggggttggtttttttcttgttggtttgtttcagttccttatagattttgtatattagcccttagtaagatccatagtttacaaatattttcttccattttgtaggttgtctctttactctgttgatagtttattttgcagtgaagaaaccctttagtttaataatgttccaattgtcaatttttgtttgtgttgcatttgcttttgaggacttattcataatttctttgcctaagttcatgtctagaaaagtatttcctaggttttcttttaggatttttatagtttgaggtcttacatttagatctttaatctacctttagttaatttttgtatatagtgaaaggggtccagtttcattctttgcctatggttagccagttttctccgcagcatttattgaatagagtatcctttccccagtgtttacttttgtcagcttcatcaaagatcagttggttgtaggtgtgcagctttatttcaggggtctctattctgttgcattagtctatgtgtctattaatgtttttgtaccattaccatgctgtttttgttactctagccttgtagtatagtttgaagttggaagatatgatgcctctggctttgttctttttgcttaggattgctttggctattttggctattttgtgtgtgtggtgggtgggtggttcatatgaattttagaatagttttctctaattctgaaaagtgacattggtaatttggtaagaatagcgttgaatctgtagattgctttgggcagtatggatgctttaatgatattgattattctgatccatgagcatgaaatgcttttttatttgtttgtgttatctatgatttctttcatcagtgttttgtagttctccttgcagagatctttcatctccttggttagatgtattcctaggtgttttatttcatgtttttttgtggttattttaaatgggattgcattcttcatttgattctcagcttgaatgttattggtgtatagaaatgctactgatttttgtacattgattttgtatcctgagactttgctcaagtcattagatctaggagtcttttcacggaatttttagggttttctaggtatataatcatatcatcaatgaagagagataacttgacttctcttttcctatttggattccttttatttctctcttgcttgattgccctggctaggacttccagtactttgttgaataagaatggtgagagttgacatctttgtcttgttctcattcttaggaagagcacttccaacttttgcctggtcagtacaatgttggctgtaagcttgccatagatggctcttattattttgaggtgtgttccttcaatgtctagtttgttgagggcttttatcatgaaaaaatgttggattttattgaatgctttttctgcgtctattgagatgatcatacggtttttgtttttatttctgtttatgtggtgaatcacatgtattgagttgcatatgttgaaatatccttgcatcccaggaataaagcccacttgattgtggtgaattaattgcttgatatgctgttggatttggtttgctaatattttgctgagaatttttgcatctatgttcatcaaggaaattagcctatagtttcctttttttgttgtgtctttgctagatcttggtgtcaggatgatactggtttcatagaataaattagggaagaatcctttctcctcaattttttggaataatttcagtaggattggtagcagctctttcttttatgtctggtagaaattggctgtgaattaatttggtccagggctgttctgggctggtaggctttttattactgattcaatttccttattcattattggtctgtttgaaatttctgttccttcctggttcagtcttgggaggttgtgtgtttccagaaatttatccattttcctctagattttctggtttgtatgcagagatagtagtctctgagggtcttttgtatttctgtgtgatcagttgtaatgttacctttgtcatttctgatcatggttatttagctcttctctttttcttttttaatctaggtagcagtttattaatcttgtttatcctttgaaaaaacaacttttgtttcattgaacctctgtatggttttttggggcctcaatttcatttcatctacactgattttagttatttctttgtttctgatagctttgggtttaatttgttcttatgttttagttcctctaggtgtatgcttaggttgttaatttaagatttatcttcttgatataggaattggcactataaacttttcttttaacactgcttttgttgtaacctagatgttgtagtagattgtttctctattttcatttgtttcaaagaattttttgatttcattcaggagcaagttgttgagtttccatgtatttgtctggttttaagagtgcctcttggtattcaacttattttttaaggctagtataccttgttactcatactcaacaaaaatgagacaaaaagaaaaatttacaagccaatctcagttataaatatagacatagaactttgaaacaaaacattaagaatacacaagcagcaatgtagaagaatgatcaaattagatttattactggagtgcaagattaagttagcattagaaaaatctaataatgtaattcactacattaacagatcaaagaagaaatactatataatcatcttaatagttgttgaaagagcattcaattatattcaatagcccttataattaaaaattcccagcaaactaggactaaaagagaatttgcttaaattgctaaagggcatctaaaataattataagaaatattatcaatgatgatacattgtaagtgttcttaaaatcaggagcaagcaagaatgcccactctcataatttctattcaacatggtactgaacgtccttgacattgcagtaagacaagtataagaaataaaaagtatgaagattggaaagtaagaaataaagttataattatttgcagtcaatatgcatatttgcatagaaagcccaaaagctataaaaattaaagttaataaaaaagtttaataaagtggcaaaaaataagattgatatttaaaggtcaattgtatttccatatactaccaacagacagaaaacatatttcctaaaagatgctattgacaatggcaacaaaaagcaaggcgcctaggaggaaatctaactaattattaatctaataatatataagatcataatggagaaaatttagaaaacttattgaaagatatcaaagaaaccaaagaactctacataaatagacagaaagggctgggtgcagtggctcatgcctgtaatctcagcactttgggaggccgaggcaggcagatcacaaggtcaggagattaagaccatcctggccaacatggtgaaaccccatctctaccaaaaaataccaaaaaaatgagctgggtgtggtggcacgtgcctgtagtcccagctacttgggaggcggaggcaggagaatcgtttgaactcgggaggcagaagttgcagttatgcagttagccaagatcactgcactccagcctggtgacagagcaagactctgtttcaaaacataaaaataaaaaaataaaaaatagataaataaatacataaataaataaaaagaaaggaagaaatgaatgataggagggattcagtttcatatctttcttctccaactgatttctagaatcaagtcaaaagtaccaccgggtacttcaccacttaacaagctgattttaaaatttattgaaatgagcgaaggattgctaagatacttctgaagaaaaataacaaggcgacgggactttttcctctcagatataagagcttgtatacaggaaaagtagtttgccagcatgatatctttgcaaagatggaaaaatggactaaaggaacaaaattgagaacccggaaacacgcttatatgtacctggaaactttatatgacagaggtgtcattacagataagaaaagatagactactcaataaatgctagtgtaattggttatacataaagaaaaaacaaatttagttccacacatcgtactgtatacaattccatgtttttgtttttttgtttgtttgtttgttttagacaggttcttgctctgtcacccagtctggactgcagtggtatgatcatggctcaccacggcctcaacctcctgggctcaagcaaccctcctacttcaccctctgtagtagctgggaccacagacacgcactaccacgcctggctaattattattatcattattattattattattttgtattttttgtagagatggggttttgccacgttggccaggctggtttcaagctcctggactcaagtgacccacccaccttggcctcccaaagggctgggattacaggcatgagccactgtgcccaggcagtccgtatattaagaaatgaaatgtgaaaggcgaaactttaaaaacaacttttagaagaaaatataggtaaagatctttttaaccttaaggaagaaggacttcagacacaaagctcaaattagaaagaaagtggttgataaattcactacattaagagctccctttaactgaaagatcaaaaaaaataaatagataaggtactgtgagaagatatcctgataaaaaatgtagagaattcattgaaattttaagcagaaaacgtaaataacttctaaacattaattaaataaaagacaacctaacaaaaaatcaaaacttagaaaaaatcgagaaaattaggaaaatatacattaaaaccatgatgagattctatttaacactcaccaaattggcaaaatctgaaaagcactggtcagaatgtgtgtcaaaaagaaagaactgccaggcagtggttcatgcctgtaatcccagcacttttggaggtcaaggtgggcagataacttggggtcaggagtttgagaccagcctggccaatattgtgaaacttcatctctattaaaaatacaaaaattagccaggcatggcggcagatgcctgtaatcccagctactcaggaggctgaggcaggagaatcgcttgaacccgggaggcggaggttgcagtgagccgagatcgtaccactgcactccagcctggcaacagagtgagagtctgactcaaaaaagaaaaagaatttttatacactgcgggtgggaatataaattgatacaaaccatttttgtataatgatatggcatttctagtaaaactgaagaaacactaaatacccagtaattaaacccttagtgtacactaaagacatgttcatcaattttcagagtagcattattttaacatcaacttcacagacatataatttacgtacagcaaaatgctcctactttaagtgtatagtttgatgagttttgacaaatgtacacaccagtgtacctaccaccacaattaggatataacactttctatcactcctaaaagtttcttcttgcttgtattagtctgttttcacactgctataaagatactatccgagactgggtaatttataaaggaaagaagtttaattgactcccagttctgcatggctggggaggcctcaggaaacttacagtcatggtggaaggtgaaggggaagaaggcagctcttcacaaggcagcaggagacagaagggagagcaaagagggaagaggctcttataaaaccatcagatcttgtgagaactcactcactatcccaagaatagcctgggggaaactaacccatgatccagtcatctcccaccaggtccctccctcaacatctggggattataattcaagatgagatttaggtagggacacaaagccgaatcgtacattacaaagctccattacagaagagcccttctcctactgccaatgcacttttccattttcttgaatgtcatatgagtggaatcatacaatatatagtcacttgattttgtcctctttataatgcttttgagattcatccacgctgttgcttgtagtttgttcctttttgtggctgagtggtatcccattacatgaatacagcaagagttgtttatatattcactagtttttagacatttgaattgtttccagttcttggctattataagtaagaaagctgctataaaaattcacgtacaggtcttcatgtggacatatgtttttatttctcttgtgtaaatttctaggagtggaatttttgggtcatatggtaagtatatgtttaactcataagaaaatctgttttccagaatgattatactattttacattcctaccagcaatgtatgagagtttcagttcacagcaacattattcataacagcaaaaaatggaacaacacaaatgttcactgtcagaagaatgaataaataaattatagtatattcattcataaaaataccatatataattaactacagctctatgtatcaacatgactaaaacatgttaagcaaagtaaaagcaaatcacagaatacatatggtatattccatatatatgtatatatttctaaactatgctatagtgtaggggtgagaagagataggggtgcttcaaatgcattggtaatattctgtttcttaatctgggtgataggtacatgggtcttagttattattatttaactggcacaatacattttatatatgtgtgtataatatatttttataataaaagtttaaaaagaaaggtagttgatgtttctttaatcttactgttgcttttctttaaaaagagaaaatatttgacttgagcatttgtcctatagtgccatgtattttcccaattctgttcagtattctatgtacttcctctgagaggttgcagtcttagtactggagtaattctggaatgcatttccatctctgagagtgaacatttagatgttgactctcagcagtattaatggcagcagttaaattcataaatccttgcttatggagatgagaatatagtccacctgatagcaaaaatgattgagtagaatttatttatttcttaaaattatactggggaaggatgtgtcttctatttatttcttttccaattcaattatttaaagctgaggtttaaaagtcatcacgaaattaccccatagccgaatataaaggatctgtcatcaattctagaaagctcagttggtcacttattgaataagaagactacactattgacagtaaacatttctctatctctcttttaggtcatatcatagcaatataaattgaagaagttgaaagtttcataaaatgaaaagtgccagtgaggaaaatggaaagatggcaagaaatcagtttttcatgtattttagtgatattaaaaaagatacagattatggagttccatcagatggtgcatctccatatccttcctggggcattattagtgaaggcaatttttttttattgtagttacaatctgattacaactttgattataaatatattaagatcccagcactttgggaggccgaggtgggcggatcacctgaggtcgggagttcaagaccagcctgacaaacatgaagaaaccccgtctccactaaaaatacaaaatcagccgggcgtggtggtgcatgcctgtaatcctagctattcaggagggtgaggcagaaaaatcacttgaacccaggaggaagaggttgcagtgagccgagatcatgccactgcactccagcctaggcaacaagagcaaaactccatcttaaaataaaataaaataaataaatatattaagacataatgaaattgtgtatttgagtaaattttgtatagctggaaattaaatgtgaattattacagaagaaatttcaaatatagaaggctagtaaattagctcttaatttattaaataaaaacaaaaatcaccagtgattcaacacttatggaattactatcaaaatacaaattatacacattttaaaaatgctttaatatcaatcatgagcttgatttttttcaagtttgaagcaaggtatatgagtaggggtaattattttatttcattttttaaatttttttattattatactttaagttttagggtacatgtgcacattgtgcaggttagttacatatgtatacatgtgccatgctggtgcgctgcacccactaactcgtcatctagcattaggtatatctcccaatgctatccctcccccgtccacccccccacaacaggccccagagtgtgatgttccccttcctgtgtccatgtgttctcattgttcaattcccacctatgagtgagaatatgcggtgtttggttttttgttcttgcaatagtttactgagaatgatgatttccaatttcatccatgtccctacaaaagacatgaactcatcattttttatggctgcatagtattccatggcgtatatgtgccacattttcttaatccagtctatcattgttgggcatttgggttggttccaagtctttgctattgtgaataatgcctcaataaacatacgtgtgcatgtgtctttatagcagcatgatttatagtcctttgggtatatacccagtaatgggatggctgggtcaaatggtatttctagttctagatccctgaggaatcgccgcactgacttccacaatggttgaactagtttacagtcccaccaacagtgtaaaagtgttcctatttctccacatcctctccagcacctgtcgtttcctgactttttaatgattgcctttctaactggtgtgagatggtatctcattgtggttttgatttgcatttctctgatggccattgatggtgaacattttttcgtgtgttttttggctgcataaatgtcttcttttgagaagtgtctgttcatgtccttcgcccactttttgatggggttgtttgtttttttcttgtaaatttgtttgagttcattgtagattctggatattagccctttgtcagatgagtaggttgcgaaaattttctcccattttgtaggttgccctgttcactctgatggtagtttcttttgctgtgcagaagctctttagtttaattagatcccatttgtcaattttgtcttttgttgccattgcttttggtgttttagacatgaagtccttgcccatgcctatttcctgaatggtaaagcctaggttttcttctagggtttttatggttttaggtctaacgtttaaatctttaatccatcttgaatagatttttgtataaggtgtaaggaagggatccagtttcagctttctacatatggttagccagttttcccagcaccatttattaaatagggaatcctttccccattgcttgtttttctcaggtttgtcaaagatcagatagttgtagatatgcggcgttatttctgagagctctgttctgttccattgatctatatctctgttttggtaccagtaccatgctgttttggttactgtagccttgtagtatagtttgaagtcaggtagtgtgatgcctccagctttgttcttttggcttaggattgacttgagagtaggggtaattattaaaaaaaaaaaagaagaagtaattctttcattgtgctccatattatttagaaatcttaaaaatatattttgccccaaatgattatatgagaaatggtgaagatgctacataaaggtggaattaaccatgtcagttgttttctttcttttttttttttcttttttttttagatggagtctcattctgtcacccaggctggagtgcagtggcacgatctcggttcactgcaagatctgcctcctgggttcacgccattctcctgcctcagcctcctgagtagctgggactacaggtgcccgccaccatgcccagctaattttttcttttttttttttttttgtatttttagtagagatggggtttcactgtgttagccaggatggtctccatctcctgacctcgtgatccacccgcctcagcctcccgaagtggtcggttgttttcttatgctaacaaaagactatcagactgggaatttctgaaagataggttgcctattccttagttgatcattactgctaaataggaattcccaatttttacacagtaagctttgattatttttatgaattaaatcatagataattctgtcctaaaggaaagatgaatttaaaatttttactttggaatataggtttgcatttaatttaattaaattaatttatttgagatggagtctcactctgttgcccagtctggagtgcagtggtgcgatcttggctcactgcaacctccacctcccaggttcaagcaattctcctgcctcggcctcctgagtagctgggactacaggtgcccaccaccatgcctggctaagttttgtatttttagtagagatgaggtttcactatgttggccaggctggtctcgaactcctgacctcaagtgatccaactgcctcagcctcccaaagtgctgggattacaggcatgagccactgcgcctggcctggatttgcattttaaatgacatatatttgtacaaatttcaaaagtgttttcatatgtactatacaatttgatgttactataaccccatgagattagcaggcttatctctattttgctagtaagaaaattagactcgtggagattaagtaaattgtctaagtatcttgactaatgactgacagatatagcactggaatcttttttctccttttgagacatggtctccctttgttgcccaagctgaagtgcagtggtgtgatcatggttcactgcagcttcaacctcccaggcttaagtgatccttctacctcagcatcctgagtagtaaggactacaggagtgcaccaccccgcctggctaatttttgtattttttgtagagatggggtggccatgttgtccaggctgatctcaaactcctgagctcaagcaatctgcccacctctgcctccaaaaggactgggattacaggtgtgagccaccacacccagcctagagtgtttgtcttttgtttctgaactcagtattatttctattataccataatttccatatcttatgtttgtcttcagacaaaagtaaaaattaggctgtcatcttgttaaatttcatctttagaagttgtggtaggctgaataatggccgtctaaagatatctggtgctaattctggaaacctgtcaatgtcaccttataaggaaaaagggtctttacagatgtgactaagttgaaggtcttgagatgtgaagattattctggattagcctttttggctagtagaaacagagacacagaggagaaagcaatatgactatggagacagagattagagtgatgtggccacaagccaaggaatgccagcagccaccagagggccaaggaacagattcttccctagaacctccagaggtagtacaatcatgtagacctctcaacttctgactactgaaacgatgttggacttctggcctccaaaactgtgagagaatgaatttttcttgttttaaattaccaaggttgtggaaatttgttacagcagccctaggaaactgatacagagatactgttcaaagttttcataccctgttcaactccatgcaattgacttgagtctttattttggaacagatggattcagaagaatctaaggtttgtccataaaaaattccccagaatagagaatggttaaaatgctgagattccaagcgcttctttataaagacacctcttctctgaaagttaatagggaatgttcacaggtttaaaagagaaatgttgctgggcaccatggctccctgtctctacaaataattttttaaaaattggctgggcatggtggcatgcccctgcagtcacagctactctggaggctgagttgggagaattgcctgagcctgggagccaaggctgcagtaagctatgattacaccactgcactctagcctgggcgacagagcaagatccagtctcaaaaaaaaaaaaaaaaaaataaataaataaataaaaataatgaaatagaaatatttaaatggaatagttattgttaattcaagtttaaaaaacagtcttgtctctgataagctgaaatgtactgaatccacctaagaaaaactgggagcatactgtgtatttatttgaatgccaaaaactcaaagctttacagtaaagaaagtgtttttcttttttctttacagaaagaacattggagctatcatgtctggaagtgtgtttgcaatctaattttacctattcactctcctccttaaatttttcttttgtgacttttctgcaaccagtaagggaaactcagattatcatgagaatctttctaaatccctccaattttcgtaacttcaccaggacttgccaagacatcacaggtgaatttaaaatgtgctcctcgtgtttggtttgtgagtctaaaggaaacatggattttatttctcaggaacaaacatcaaaaggtaaacacaaagtgaaggtgagaataaaatggtatcaggtataaattaatttattctgttaaaaacgtattaataatatattctttttttttttttgagatggagtctcgctctgttgcccaggctagagtgcagtggtgcaatctcagctcactgcaacctccacctcccaggttcaaggaattctcctgcctcagcctcccgagtagctgggaccacaggcgcctgccaccacacccggctaattttttgtttttagtagagacagggtttcaccatcttggccaagctggtctcgaactcctgaccttgtgatccactcacctcagcctcccaaagtgctgggattacaggtgtattagccacagcgcctggccaatatattccatttttagatccagtggcactggaacattcaatgatgtggctcttgatgagtgacttgctgggctttgggatgttactcggttttggtttactttgacttattgaaaacaaagaattcttaaaatacatcaaaatgccactgtaattcatatacacatgatgggtagaggattatttggcatatactctcttcaaaagtagtaaatctttaaaaaacaattttaagtgaatctgtagtttcttatagtaaaatcaaactttgattctctaaggaatcattgagcccttgcatttatacctactcctgcttaacatttagtcattgtatgtgaagtctttttacttctctgactctccagtaagcttcttgagggcagggcctttgtctttgcttactactaaatttcaagctttgtgcacaatgtctgacataatacctagtagacactcagtaaatttttgtggaatgaacaactgaataaataaagaataactgcttattatctgcagtgcctaactgaaccttgcagttatcatgagaccaatctatattatttaattaaatcaaataaaaatggatcattgagaaattaaataattcctttacaatcataaaatatgctgatggcctcaagcccaaacatcaaatttattacttgtatttattcagtgagagaggttgcctccttatcactagatactgaaatttatttttttggcattctttgagaatgggaacataatttcttggcatttaccttgtttttctgttgttttcatgtacttattgggcatttatgtatctcttcttttaaaaaatatatcattatagattcagggtgtacatgtgcaagtttgttacatgaatatattttgtataattgtgaggcttgggcttctagtgcgcccatcacccaaatagtgaacattgtacccagtaggtaatgttccaaccctcacccctctgccccttgtcattgactttggatgaagttcttactcaagtagtgccgtaactcctccaggttctgggctgaatgcaacagaaagcaaattgtgaaaatgcctctatgatgacagagaactaggaagtgttttaagggttggtagctcacagatcttctctgcctccttgaaaggtgaaaacagcacattgacacattgtcccagttgctgtggctctgtaataaagtacccccaaaactcaatggttttaaacagcaataattttattaaataaattttctttttttgtgtgggtcctagctatgtctattacattttctttatccactcatctatcaatggacattgatctatctgtctatctatctatccatctctccagatacctatctatctagtttactttttctttatctactcatttatcaatggacattgacgttgtttctattcttggctgttgtgaatgatgctgcaatgaacaagagaatgcagattgtgtcttcgggatgctgatttcagttcttttggctacataccaagaggtagaattgctggatcatatggtggttctgtttttaattttttgaggaaccgccagacagttttccatagtagccggaccattttacaatcccaccaacactgtgcaagagcttaaatttcttcacatttttgccaacgcttatgtttttttttcttttcttttctttttgagatggagtttcactctgctgtcaaagctgaaatgcagtggcacgatctcagctcactgcaacctctgcctcctagtttcaagcgattctcctgcctcagcctcctgagtagctgggattacagacgcctgctaccatgcccagctaattttttttttttttttgtatttttagtagagacggggtttcaccatgtgttggccaggctggtctcaaactcctgacctcatgtgatccacccgcctcggcctccggaagtattgggattacaggtgtgagccactgcacctgttcttttttttttttttcttagtaatggtcatcctgacaggtgcgaggtgtttctgattgtagttttgactttcattttcctaatgattagtaatattgagcaccttttcacatatatcaataggccatatatctttgttggagaaatgtctatgaaagtcctctgcccatttaaaaatatttgatatatatattttttgcaattgagttataggagttcctgatgtgttttggatattaaccttttatcagataaacagtttgaaaatattttctctcattctgtaggttgccttttcactctgctgattgtttcctttatgtggtctttctacctgggctagtctgggtgtcttcacatcatggtggccttaaggttttggacttttacgtagtggttcaaggctccagtatgagtgttctgaaaagcaagacaggaatttctttgccttttctgacttagtcatgcagtgtcacttcctctgcctttgattggttataagcaaatcacaaaccttcccagattcaagggaaaagaaattatttatttatgtatttatttttttgagatggagtctttctctctcaccaggctggagtgcagtggcgtgatcttggctcactacaacctctgcctcccagattcaagtgattttcctgcttcagcctccggagtagctgggattataggcgtgcgccaccacgcccagttaattttttgtattttagtagagacggggtttcatcatgttgctcaggatgatctcagtctcttgacctcgtgatccacccgccttggcctcccaaagtgctgggattacaggcgtgagccactgagcccagccaggaaaaggaattaaaagcaaatcacgaatgctaccagattcaaggggaaaggaattagattccttaatgagcaaatggtgaagtttttagggtaacatgtgtgttatggattgaattgggtcctctcaaattcacatgttgaagtcctaaccctcgatacctcagaatatgacattatttggaaatacggtcattgtagatgtagttaagatgaggtcattaggatgggccctaatccaatatgactgatattcttacaaaaaaggagaagtttggacacagagacatggacacagggagactgacatgtgaagatgaaggcagagagcaggatgatgcatctccaagtcaatgaatgccaaaggttatcagcaaaccaccattagctaggagaggggctcagccctcagaacaaatcaaccgtgccaacaccttgatctcacacttctagctttagaactgtgagacaaacttctgttcttttctttttttttttgagactgagtctccttctgttacccaggctggagtgcagtggtgcaatcttgacccactgcaacgtctgcctcccaggttcaaacgagtctcctgccaagtagctacacctgcaggcacacatcaccacgcctggctaatttttgtatttttagtagagataggattttgccatgttggccaggctggtctcgaacccctgacctcaggtgatctgcctgcctcggcctcctaaagggctaggattacaggcaggatcgccgtgcttggcccaaacttctgttctttaaaccccccagtttatggtactttgttacagcagccctaaaaaactagtacagtgtggaatgggaaatattgttgtgaccatattggtcacacaatacagtctgtcccacaagtcactggggaaatgtgtgtattttcttttagatgctccaatcctattccaacactaccacaacctggttttcatgatcttaaaaaatataaccaccttactgattatttttaggttggctgcagtggctcacgcctgtaatcccagcaattcaggagtctgaggagggaggatcccttgagtccaaaagttggagaccagcctggacaacatagcaagacccaatctctacaaaaaattaaaaaaattagctgagcatagtggcatacacctgtagtcccagctactcaggaggctaaggtgggaggattgcttgagcccgggagggtgaggctgcagtgagccatgattacgccactgcactccagcctgggagacggagtgagaccctgtctcaaaaatatgtatatatttttagtgtaggaaacttcttgtttctactttcttgtatagaaaggaagagatttagttttgaattgtatgtgttttcttgctatgtattaatattttgcaaataacattttcttaatcactttctagttcttatcaggagaggatcaatggaagtgaaagcaaatgattttcattcaccttgtcagcactttaacttcagtgtagctcctctggttgaccacttggaggaatataacactacctgtcatctaaaaaaccacactggaagatcaacaatcatggaggatgagccaagcaaggagaaatcgataaactacacttgtagaatcatggaatacccgaatgattgtatacacatttctttgcacctagagatggatataaaaagtaagtttttaaggaaactaaagggaaaaggagttatccgatatagatatgtaaaattaagtaagggctatcacattaactgaaagccaaatagctgaagaattttactgatgaaataatatagcctgaaagaatgttagtctatttatctgtttatttttctttcaaaatatgctttttatggggcctacctgtaacctgagaaagaggaggcatttatgggtcacgatttgaggagcactggaaagaccttctgcctcagaataatttttttttattgttgcagtggggtggtggtggttgtttgagacagggtctcactctgttgcccaggctggagtgcagtgacacgatcactgctcactgcagccttgacttccccgggctcaggtgatcctcccacctcagcctcctgagtagctgggactacaggtgtgcaccaccacacctggttaattttttgtatttttagtagagacggggtcttgtcatgttgcccaggctggtcttgaactcctaggcttaagcaatccacctgccttggcctcccaaagtgctggtattacaggtatgagccaccacagaataactttgaaacatgcctattttctgtgagtgaaataataccaccatatttgtgtactaaagggaggcatttcttttaaaatatgaatattggctgggtgcggtggctcacacctgtaatcccagcactttgggaggctgaggtgggaggatcatgaggtcaggagttcgagaccatcctggctaacacagtgaaaccccgtctctactaaaaatataaaaaattagctgggtgtggtggcatttgcctgtagtcccaggtacttgtgaggctgaggcaggagaatcgcttgaatccgggaggcggaggttacagtgagccgagatcgcgctgctgcactccagcctgggcaacagagtgagactctgtcttgaaaagacaaaaaaaaatatatatatatataatatattatatattatatatatattatatatatataatatatatatattatataatatattatataatatattatatatatatgtagcacattgtgatatgctattaaatttttgttttgagttgatttaacatgttctctcttggagctgagaaccaggcctggatgaaatgggagtttgctgtaatgctgtgaagatagggtgaggtacagattaggcacctagaggaaaaaataggagattaaaagacaaatcttacatacttgcataacttaattctgtttaaggttggttaacttcctagttaccctattctgaaataccacaattattcctttctactaagcagtatgccctacttcacccaaaaaatctattcctggagagcatcttttgatacatgcatttaatgagtgcctgctgtatgctaggcagtgtgtcaggtgttggggtcatgaagttagatgatatgaaacaatctgaaagagggcgacccctcacctacaccagcaagtgccttccagtgccacaggtgctatgggagagtaatttgctgtcctttttgatattccagacatacggaagcctttcagattgcttttctaaagctttaattattgtaaaggtaatgattttcaaaatattacattcactttaaagcaaacagaaatatataatgtgcacgcatttttaagataaaatgtgagacttcaaagaaatttctcctgtgactaagttttcccacggccctataacctctgcaattaggggtcatttcaaggtgtgtgcatgagtgggggctatggaagaggatctgagtagatctgaacagaaggatcagttccctctgattgaggagtgaatgaattggaagatggactctggaaagattgcctagagaaggtgactgtagtgaaatctgaagggtaaagaagtttagattatagacatcaaaaacatatttttttcaatgtacatttgtatatccacctaactgtattttatattttttctaaaataaagaaaaaataagcacttccataataataattttaagatttttgtgtgtgtgttcatggaaaaaaatccataaattctagaatcaaagtgaaataatagttaacagcttttgggtgtccacaaagatagcagtggtgcacaaatatgtactcttgtattctgcgaaaagtatattcattttgccatgggtagaaagttaaaggtggctgggcacggtggaggctcatgcctgtaatcctagcactttgggaggctgaggtgggtgtattgcttgagcacaggagttcgagactagcttggacaacatggtgaaaccctgactctacaaaaaggatgaaaataagctaggtgtggtgcacacctttagtcccagctacttcagagactgaggcaggaggactgcttgagatagggaagacaaggctgcagtgagctgtgattaggccactgcactccagcctgggtaacagagtgaaacactgtctcaaaaaaaaaaaaaagaaaagaaaagaaaaaaaaaagacagttaaaactttattcatagtttactctgctgtgcaaaaactaatttgatcttgcttaaaagccttcttaactgggcgaggtgggtcatgcctgtaatcctagcactttgggaggccaaggtgggtggatcacttggggtcaagagttcgagaccagcctgactaacatggtgaaaccctgtctctactaaaaatacaaaaaattagccgggcatggtgtcatgcgcctgtaaacccagctacttgggaggctgaggcaggagaatcgcttgaacctgggaggtggaggttgcagtgagccaagatcgcaccactgcactccagcctgggtgacagtgagactccctctcaaaaaaaaaaaaaaaaaaaaaagaccagaaaacaaaccaaaaaaacaaagcaacagcaacaaccaactttgtactttggtgggagtaaaagccttctccatcagcgggtgaaactaaatgtgatccagtctggcaaatttactctgagataataatttaaactgttccttgatgttccccccagatttctgtctgtttccccttgctcctctctaagaaggctgcagggatgggtgggcagcacaggaccctaggagatacactcttctgagatcatgctggtggctgcactggctggtctggtccccatcatgtgtcttgtgttattgcaatatgaagttggttctgtttccatagctttatcagtgcccaatgacaccttggtctttggacccatcctgatcgttgctggcactgccagtgttctctgctatttaacttcatgcttttattttgctgcgtgaggaatgcaagcctggcagctgaagagcgtggaatagtcttggggaggctgagcgccgccatcctaatccacctctgccctttttctacttagccacctctctaaatgaatgcttaatgcctatttagtgtacatctgggttcctgtaaaggggacacccaggttatgaaccccacaaaggcagttcataccaagagtataaacatggtatacattctgctaaggtgcataagtactagctgtcttttgtatgcaaagaagagtgtacacagggtgggcttagaaagtcagtagacaggccaggtgcagtggctcacgcctgtaatcccagcactttgggaggccgaggcgggtggattgcccgaggccaggagttcaagactagcctggccaacatggtgaaaccccatctctactaaaaatacaaaaaattagccgggcgtggtggtgagcacctgtaatcccctcggaggctgaggcaggagaatcgcttgaacccggggagtggaggttgtggtgagctgagatcgcgccattgcactccagcctgggcaacaagagtgaaactctgtctcaaataaaataaaataaaataaaataagataaaataaaataaaataaaaaatgagtcagtagacagttgtgtgttagctatgatgatgccacccttgtgtgagtcactgattcctggttctgctggccagtgtgtctttatgagaccatgggagaccgtgctaagctactgctgcatggtgaacatccttcccatgttgcctcattgtcatctgaatgaatgagtttatacctgtatccttattaaatttaggccagggcaactacgtttaattagtgcatgcacttgatctgatcattggcgtgcaaagcactgtacttaccgcctattaccctgtggaaagagggtctgattattcattgtcctggccacttatatgcctcagaccagtcctttgactgcctgcctttctctttcttccccatcttccttgtactcactgcatctttgctgatttgaggacatatttttgggctgcctggcccagggtcaaaattatgaattgtaagtggttctgattctgggattgctatgttgtggtcttaccttagttacagcgaggatagtgaaactaatatcagcataacctgtaagtgaaaggaatcctagaattttggaactacatggatagctggaagctacctactcaagtttacccgtataataccttcatttcatatatcaagaaagaattcaggagagctagtgaccctgtaacagtgatggtcataatttcagcttttcaattcagggcagaatatgttgtagaactcagctacactgccacattgccttttatctgttgaataattttactgggtttttacagtatttgttttctttacagatatcacttgttccatgaagatcacttggtatattttagttctattagtttttatatttttgatcatcctcactatccgcaaaatacttgaaggccagagaagagtgcaaaagtggcagagtaagtataatccctgtagtgccgaggaactcctgatctcttctatggatttcatttcctttttagtacaatttagcatttcttgtgcacctactgtgaataagtggtgattcttggtaactcaaggaataaaaacgtagataaaacacagttccagcatgcaaggagcttcattcatctttcttctactcgggcaagtaagagaagaagaaagactgggtgaataggaagaagctgatgagctggacattgagcagggcttagcggaagtgagggcagagagagagagaagaacaggaagtggggataaagaatttcaggccgagcgcggtgactcatgcctgtaatcccagcaccttgggaggctgaggcaggcggatcacctgaggtcaggagattgagaccagcagaccagcctggccaacatggtgaaagcccgtctctactaaaaatacaaaaattagccaggcatggtggcgcaagcctataatctcagctacttgggaggctgaggcacaagaatcacttgagcccaggatgtggaggttgcagtgagctgagatcgcgccactgcactccagcctgggcaatggagcaagactcagtcacaaaaacaagaatttcagagttggagatcttgagcagagtggctgtaggtgacgggtgtgaggcagagtcgatctttaataagcatgggggtatcagatttttggcagggctgagctaaaggaaattagaaattaggaatcaggacagtaggagcaacgttaaaaatatttaataactcgtatgacctaggcacccacctatcaggatggacattgattgtaaattactggtatgatgctaccggtgtgtacccatgcaaatactggctctactggcatgtccccagtgcataaaatggatgactatcaggcccaatggacaattcataatatgagtagctagtctcttaaagacagtgcaagatgtattactataagaataggcactaaaaataaatagatttatgttagagtcctagtactaccacttactagctatgtgacattaagcaagttatttaaattatgtgagcatcccttacatcctctgtaaaacaagcataatcaccactaccacacagggttgaggtaaggaaatacagagattacttacaaagtttaccacagtgtctagtgcataattagttttcattaaaggacagtagtattgtggtggttgtatgatttcccaagactctttccttctttaccaggcaaggctgtgttagccatttcagtaggcagaacaagtggttgcctccaggtttcagtaaagttgcaattcattcttttgactaggtatttgttgcagatatttttgagagcagtttcatatcaagtgttatcattgataccttagtaataaagccctttgtgcagtggttaataacataatcaatactgtttatttgtagaataaccattttcagagcattttcactagattcttaaactgtgtaaacaggatatatgctatttttattttgtagataaaaatcccctgagacttagagaggttaagtgtttatccaaagctgcacagctagtaaaatgtcagaactaagatgtagggtatttagttttgaaaattctattatttaaagtaaatgtgtgttatttataaatagtgtatagttctgagtttcttgacccattttcccatatgaaaagctataagcaaagagagatagaagtgagctagaaaaaatgtctagaaggagaccagtagtggggagtcaaattaaattcttacaaatatctgcccaaatgacagacttagtgattttcaaaggcttgcaaatccaagcatacaaagtaataaaaaatgtcacactacttagcacattaaatgttattgaatattaaacatacattgaatattcttcacatcatatctatgtatataataagataaaaatatacttttctgtgtataagagctgtcgctttccttttttttttttttttttttttttttttttttttttttttgagatggagtctcactctttcgtccaggctggagtgcagtggcatgatctcggctcactgcaacctccacctcctgggttcaagcgattcttttgcctcagcctcctgagtagctgggactacaggcatgcaccaccacgcccagctaatttttgtattttttagtagagatggggtttcaccatattggccaggctgggttcgaactcctgacttcgtgatctccctgcctcagcctcccaaagtgctgggattacaggcgtgaaccaccgtgcctggccatgaatggctccattctttttggtaatcctttgaaccaacatggggaatatatgttaacaatgcgcttgtttatcatctaaatacttcatttcttttctgggaataggtcatagagacaaacctacatctgttctcttaagaggaagtgattcggagaaactgagagcattgaatgtgcaggttctttcaggtaagttctgtggcatgtaaacaaaacagcactcaggaaattccaaagctgcatggtttcactacacagtaaactcaagatctgagatctgagcttatgtaaattagccttgtatctggaataacagagctgtgggcaaatgaaatccagtttaatatgtcttattatcaggggacagtagcaatctaaactatctccttaaataatggaaagtttgcttaattggcaagaagaaattcatgtgagtaggcagaggagagaaagcaatagggataagacttagatttatttttaaatgagacaagataccattattccccagaattgcaagaagtaattgcagagtgggcatggctttcgctggagccttcccttagcagagggtgtcattgtgtaaagagaacttctaatagccccaattaaaaagccccctgtcctctcctgagaaacagaaatggaataagggaattctaattagagcagtgatgggggctgttagcacagatgttgtggttcaatccctttcttctaattgtgaagcctccttttggattcaagctgtcaaatcacgttaaaaagagaaagagagagaatgtgacatggacgaagccctcttctttagcagagagaaataatatccttgaccgtgaaaaccacagaattatgagtgctgttaccaaagctccttgtacacagccagcgagtaggtgccttcgtactttgtgagaagttagaaaaaaaaggaagcttcaagtctggcatgtaaacagttttcaaaaatgggaggatgccgagcaaacctccagtcccccaccctacagctgcatcagtagcgacatagagatttgcaccgcatttcactggggactttgttcactgggggcttttgttagccatttaaattagcagatacacggaaccctagcttgagtgcacctaaggagctcaaatattttaaaaatttaggctttctacccagcattagcagtgaaagtattaagctatgactgataataagcattagctaaataatcatttgacaccagttaaatgtggggtaagttggtggaaattttgtccagtcaatgaaaatcttatttgattaataaattaaaagctataacgttgttttcaatggcaaaattaatttttaaaaggcaaaaatggcatttttccctgggctcccctcttactcagtacatgtgtccaaatatgaggacagttttaacacagttctgtggggctttttggtcaccttaggaattctggtcgtttctgttttcaagtcgtaattttgagcactgctgtcttgtctgagaaaaagtctatagttcccccgtcaacccatatagtcgagggaatcacaaattttaagtactagctaaccacaagactaacctcgcaaagttgtatttatgagcctgtgactttcatccaccaaagaaacctgtcttagccatcctttccctttcatagctctcactaaaaatcctctggctttattaccaggtatataatattaatgtttagtgtaggtcaaggggtgatggcctttttaaaaccaagaacccttttgaggcttagcgtcttaaagagagaaagaggcagactctttcttatttatattcctttaacctaaatgcaatcttttccttccctattatgagttgcttttctgacagagaaagggaaaggaaatcatgtctcccttgagtgcagtttttaaggcctctctttgtagtgatggattataggcagcagtgagaatgtacgggaaaaatgtgtcagcatggttctctggagatgcagtaacacgggtagaaaaaaaaaatgtagttcaaagcggtggtgactgtgtcacattcagcagaagcagcttgttgtcaacactagccacacattccaggatgtctctccatttgttcatgcatttaaaagtgagtattgttcaacacacacacacacacacacacacacacacacacagagagagagagagagacagagagaaagagagagagagagagataaatgggctcgtacctccaaaagaagcttattcatcctacaagagagaaataaggagagattaccaggacgcaggcaccacattgtgcctggcagattctaggggcacggtggacactgatggaataaatgcatcctgctgctgtagaaagagatgtcaaactgaatcaaatccccatcttttatgtgtctctaatattttcctccttgctttgagaagcgtgacagcttatgtgtcctggctgggcattaatctactttccatcttattcatttaactatcgtcttcacacacgtgatctctgtcttatttatctgtggagtgttgttgctagcataatatctggcactataaaagcttattaaatctcgcaaaccctcaagggaaataagtatagagtaaaaagagcggatgagcaagaaatgagtctgagggattgggaaatatgacagcaaataaagagacagagtaattacagggcatagaattccactttattaaagaaggcatagcacgctttgtagaagggctatggatatcaaagaatcataaaaaacattgactgtcttgaagaagggattttgaaaaacatgcaaaagtaactctaggccgagtgtggtggcccacgcctgtaatcccagcactttaggaggccgaggtgggaggatcacttgagtccaggagttcaagaccagcctgggcaatatagtgaaaccccatctctataaaaaataaacaaaattagtcagatgtggtggcacatgcttatagtccctgctactcaggaggatgaggtgggaggattgcttaagcctggaaagtcgaggctgcagtgagccgaggtcacaccactgtactctagactggataacagagcaagactgtgtctcaaaaaaaagtaactttaaaacgtacccctagaaacagtgagtgcttaatgagttgaccatgttgggaaaccaaagccaggggcaggaggagtggattagaatctgaatcgttggatgcaaatgatagaagcccacttgactgactgcagagaggacatttgttggaaaaccagtaggtagcccatagaaacaacaggaggctagggaaactaagcgtggaaaataaacaggtattaaggtgagggagggcaggaaaccaaaaatacagtccaagttgcatgtcaggaatggtctggtgagaatgctcccgctggtgtcacccccctctgaactgctggggccactcctatgactaccctgcagctttgcatctctcctcaggattgcaagctccaagggaggagtatgaggggaggccatacagtggtactccaggtgccaggaagcagggagaggggataatatctgctcttctggctttctgcatacttgtcatcacccctgacatgtccacatgctggactgccaaataaatatcgacatcaggtttccgggatcagagtttccatccactcctgctgtgtgggtcagtgaaaagttcatttcatatctcccctatatgtccatcaaaaagagtgaaatccttaaaacttgaaattcttcacattggattagtcagggttctctagagggacagaactaataggatagttaaatgatagttattcatttaactatcatcttcacacaggtgatctctgtcttttttatctgtggattgttgttgctagcataatatctggcactataacagcttattaaatctcgcaaaccctcaagggaaatgagtatagagtaaaaagagcggatgagcaagaaatgagtctgagagattgggaaatatgacaacagataaagagacagagtaattacagggcatagaattccactttattaaagaaggcatagtacgctttgtagaagggctatggatatcaaagaatcataaataacattgactgtcttgaagaagggattttgaaaactatgcaaaagtaactctaggctgagtctttataaagggaagtttattaaggagtattgactcacgtaatcacaaggtggggtcctacaataggccatctgcaagctgaggagtaaggaagccagtccgagtcccaaagctgaagaacactggaatccgatgttccaaggcaggaagcatccagcatggagaaagatggagtccagaagactcagtcagtctaatctttccaggttcttctgcctgcttttattctggcctccatcgctgctgattagatggtgcccactcagattgagggcaggtctgcctttcccaactcactgactcaaatgttaatctcctttggctacaccctcacagacacatccaggaacaatacttcgcatccttcaatgcagtcaagttgacactcaatattaaccattacgaccattaagtatttaaccaatatttactgaatactgactacgggtcagccattatactaagcattggtgatataatgggcacataccataggcacagtccttgcctttatagagcttccaacatagttaaggagattctacctgtggttgacataggagaagggaaactaatatctcattaagcaccttccgtatgttctgtactttcatgcacatcatttcatttgatttcaaaactccgttttttttcctgatgagaaaactgaagataagggagtttaagtaactggttcatagctggtttctaacagagccagggttcaaactcagttctgtccaactgatgcactttctagcacgccatgtaatgtcaatagtgaactgggggactgggggtttaagccacagatcaaaagccttcctgctcttttgcattttcagtttctcattggaaactgagacaaaacattttgtctatataaggtcctaagagcttgtgtataacaatgtgagtcatcctcattgtggcactggctgaaattttcttgcaattaatgtgagtgggttctgagggaacacgaagcaaaagaaaatggagttttattgtgaaagagaattactaaatgtcaaaaggaagtggatgacccaataatttatattacaccaaaataaaactaatggcaatgtaaaattataatttggaacatgtttatggccgctataataaatactaagcaggtttcaacttcctgcagatgagaagataaattactggtgccagatgtcctgcaaccaagaaagataacgtgaaaatttaatttttacttgcttaactatcttatttatgactcttaaaatacagatttgggttcataaaacaggaaaggttacagccatctgcttggttacagaatggatcaaagtgaagaggatgattctttttgcaggaagaaattcacaaatgtgaagaatctataggcggaataggacgatttattccagtcattcattgaatgcctttacgtgacaggcatatatgtcaggcctggaagaattgatggtaaaacatgtgcacataaacatctccttcatcttaatatagattgtccctgcctgaaccatcccgcctctcctgccaccctctacaaacctgctcccctcccaccctgatgttgtctcgttagctcccatctttcctttcccatctgatcttggcttaactaacgaagttgtttcagacctcctggactaggtcgattctccttattacacaccctcataacaccgtacatctttctttgcagcaacaatcactgttgctattttacatttttgtgttattgtgctttgtgttattatttgattagtgtttctcccatgagccagttggctctttgaggtcaaggacactatctgatgatactcatcactgcatccccagctcatagcataatgcatatatatgggcatgtcataggtacccaataaatatttgccaaataaatacaactctacattgactgcgttgaaagaatggctgctgctgtcttacaaaagcctttcaaatactttcacctctaacttataacttttgattatgcctatccaaaataataaaaagaaaatggttaaacacttcatcagttttatcctttggagtattaaagatacctgcagtgtgaattaaccagaaactgaatcagtgtctcagaatattggcagctgtcagttcaagattttttttttttttttttttagttaatctggaaaattttgcagtcatttattttccatcctcattttattttcacattgactagatttggagcagatgactagttttaggatcattgttaataacagatggagctttgaacatgggaagaagttggcaccttgaataacagaaatctattttaagcggccataattggttctgttagccctaaaaggctactcgctatcttgggcttacagaaaactgccaacgtttttatgtgatgaaaaggtcagaatgatgtatagcaatattgaagttctgcatttctctggtaataaggagacataattaagactggaaggttttttgaagccagatcactgaactgaataagaatcactaaaccatcagaaaattttcacagctgtcttgacctgagtaatctatgaagactaacttgaattccttcatttttggagaagctcttgtgaggaaacccaaatacttcatggataactgtttagacatttattgccatagtttccatgaagagtcatgatggctgcatctcccaaagtgtgatggagaaaagaaggagctagggacatcatttccaaggtcagctacccataggcctcccctgctgaatatatatggctcctactaaattctgtgcatgccccctgggagggcttaaaaagatgctggtgaaaatattttttgtgcttcatagtgctttctattttcccaagtataatatatcaaaattcacagttctcatctcattttatccttacctttattttcctccttttagcctcaaggcagccacactagctttgcgaaagccacagggaagtgatcttggttgtgcaggtgtcggtccccactgccaaaactttgaatggaacgtgtggggcaaggccaggaccctgccaggactggctgcttggctgctgctgcccacaaggctgcacaggtgcctcatgtcggtgaatctatctggtccagtgcttccctttatgcctggggacttagcctcctgcaatggcagcacatcaagaaggatccattgtataatgcagttcacaccaacaggtttataaaacctcaaggccagtgcattaatccataaagaatgatacaattgagagaaatacagatcaaacacttctgacagcaaatgtgcattttctctcccaagacagatccgtgtgggaagtcaaatcacaggaaacagatgttggttaggtcttaaaatgcattcccttgccagtccaggtgtggtggctcacacctgtaatccaacatttcgggagcctcaggtgggaggatcccttgagcctgggaggtgaaggctgcaatgagatgtgattgtgcctctgcactccggcctaggtgacagagcgagaccctgtctcaaaagaaaaaaaaaatgcattccttggcagatagcttgagactttctccccattttaggggtagcctgacaagctcatttaacagagaggttttaacatttaacaagctttggattgggaataattttttgaagatgaatttgtgtgtctgtgtgctgatcgtgtgctgattttatagattaaaatcagaggaccattttatttttgttacccccaaatcatgggtggccctctggaattgctccttgaactgcctgaacccataccctgttgctgagcgaaatgaggcacagaggcgttaaatgatattcttttgatcattcagcccatatttgttgagtacctattatgtgtctaaggtaggttctggggaataaaacagtgcccagaataccagctttgtgctcaaggaggcagacaaatgagtaattacaacaaagttgggtaagttctctatttgggacgtggagggcacagagggacagatactgtgtgatctcctaaccctatttactccttcttggtatttttttaaaagttacttttggctttccaatttaataaccatataaaatgtagctgaacaagtagttttggagataagagaataaaaaaaaatggctggggcaaattcccttagcagtcaagagaggctggctaggatgaagaagttttagatgagctttcatggtgggagatggaccttgtctttgacatgaaaatcatcaggaccaaagtaacgaaaacaccttgcaagtttccagtactcagtgggaatcaaaagttacttgggaaagatgagttgaggttagataccagatgtcatggatataaagcacctttgaaaagcgatagaaatctttatctaaaagaagaaaaagaagaagcatccgagggctgcctgggcatggtcagggatagtgtgataggggctttatttgagagcataaggcatggaattttatttttaatcagtttctactcctgaaaatccattttgttcactagattcagccaggtcaaaattcagactgggatttaaaaaaatttttttaaggctgtttgaagtttctgaaaagaagtcatagaaatgtttgtttcagagatttgataaattcatgaaaagactgctgtgaagctttaaaatatttctgactgtttctactgccttaactagtgttggtgaattaatattatttgaaagaaattgtatttcttatgtagaaccagaaaaaatttccacccgttttagctattctgaagaaggcattaaaatgacatatatcctacctttttgccttttaatcaatttttagaagatttgctattaccatataagttacatgactttggatactgaaagaaactgaagataatgccccactagagaattactttagactagccatcattttgacaggcaatcgctttctgttgtaaattacagttatattttatgctataaacaccagcaaacaccagccaaaccagcggtttggcttttcaacgaaaagaactctgttaatttccttggataattatttagtttcatgaataggctcttttgatatcttaacctttataaagaatgatctcagctgggcccagtggctcaagcctgtaatcctagcattttggaaggccgaggtgggcggatcacttgaggccaggagtttgagaccagcctggccaacatggtgaaaccccatctctactaaaaatacaaaaattagccggtgtggtggtgcacgcttgcagtcccggcttctcaggaggctgaagcaggagaattgcttgaacttgggaggtggaggctgtagtgagccaagattgtgccactgcactccagcctgggcaacagagccagactctgtctcaaacaagaacaacaacaacaacaacaacaacaaaagaacaatgtcaaatgttaaattgtgggttataagatgctttgttatttgcatggtaaattcattctgaagctttaatgtgcgtcagaatcaacttggatgtctataaaaatccaggctcctaggcttctatgaagatagattcttaattcaatagatctgcaacatgcattttaaataactacctctgttgattttcaggccaagggtctgtcagtcactgtacttattagctttctgttgttgtgtaaccaattaccacacacttagtggcttaaaacagcacacacttattatctcacagtttctgttggtcagatatctgtgcgtggcttaaccggatcttctgcttagggtctcacaggctgaaatcaagatgtcagctggactgcattcccatctggatgctatgcatctacgctcactcgggttatgggaagaattcacttacggctgtgtacggagggccttggcatcttcccggctgtccactggaggctgtcctcaggacccagaggccacttggcagtcaccaccaggagtccctgtccataggcatttcacagcatggcagtttgctttttttttttttttttttttgagacggagtctagctctgtcaccaggctggagaacagtggcatgatcttggctcactgcaacttccgcctcccgagtgagttgaagggattctcctgcctcagcctcccaaataactgagattacaggcacgcaccaccatgcccagctaatttttgtgtttttagtagagatgggtttcaccatgttggccaggatggtctcgatctcctgacctcgggtgatcctcccgccttggcctcccgaagtgctgggattacagtcgtgagccactgcgcccagcctgcagtttgcttctttaaggctagtgagagtctttctgacctcaggaagggccgtttctcttttaagggattttacctctttaattcaggcccatccaagatggcctccccttttattgatttgggatattagtcatacctgtaaaatcccttcatctatgccttataatatgacctaatcacaggagtgaaatcccatctggttcatggtcttgcccacgctcaaggagaggagattataatgagtattgcacatcaggggggtgggactcctggggactatcttagaatgatccacagccattcttttagaaagacaaaaatcacaggccaggcgcagtggctcatgcctgtaatcccagcactttgggaggccaaggtaggcctcgagatcagaagttcgaggccagcctagccaacatgatgaaaccccatctctactaaaaatataaaaattagctgggcatggtggcacatgcctgtgattccagctactcgggagtctgaggtatgagaatcacttgaactctggaggtggaggttgcggtgagccgagattgcaccactgcactccagcttgggtgaaaaagcgagactctgtctcaaaaaaaaaaaaaaaagaaaagaaaaaagaaaagaaaaaaaatcacagactgctaggaacttctagtgtgagactgggctgacagacatagccccatagatgtggttggtacttaatgacaataaaataaaagttaaggatgccaaggggctcaaatgcaatggatgtgtgtggaggagagcaggagatgagtgctgtgggccaggtaaagatggcctcgggtctcattttcccctctttgtcctaataagtcaaaggaagttttgtcatttaccctttagaagtctaaagggtaagaagaaattctaactttagtggtgattttagtttttccgtagacatctaagggccctcaatatctgctggaaatggcctatttattcctgccccttaaacagtagttactatcttaattttaaaaatcttcagatcaggcgcggtggctcatgcctgcaatcccaggactttgggaggccgaggtgggcggttcacctgaggtcaggagtttgagactagcctggccaacatggtgaaaccctgtctttactaaaaatacaaaaaaatttgctgggtgtggtggtgtgtgcctgtaatcccagctacttgggaggctgagacaggaagtctcttgaacccgggaggcagaggttgcagtgagccaagatcatgccattgcactctagcctgggcgacaagaatgaaactccatctcaaaaaaaaaaaaaattacttttaattaaaaaaaatcttcagttaaaatatataattttctgggaaaaatgtataaaacccaacaccagaagaattagaaaatctaaattgtcatggaagaaatagaaaatgtgttaattgtccttcaaaaagtaacaggaagagcagttcgcaggagaatgctaccaatctctaagacataggtatttccaatgtatttaaactgttgcaagaccaaagatatttcctaattctatttttgaaataaacattattaataatattcaaatccaagaaagattgagtctaaaatgaaatcagcctggatgcagtggctcatgcctgtaatctcagggctttgcaaggctgaggcaggaggactgcttgagcccaggagtttgaggctgcagtgagccatgatggcaccactatactccaacctgggtgacagtgcaagagcttgtctaaaaaaaaaaaaaaaagagagaaagaaagaaaaaataaataaatcattgagaaatcttacttgtgtatatccatgcaaaaatcctaaataaaacattagcaatccagtagcacagtttaaaaataacacacacacacatacacacacacacacacacacgcactccttcctgatcaagggggcctattccaggaattataggacagtttagcattagaaaacctgttactcatcatcatatttatagatgtaaagagataaatggttggttatactaaaaatgcatttgacaaaatacaatgcatttttcattaaaacttctaataaaaataagacaaatacatacttccttaatgtgataaaatgataaaatatatttctctcaaacaaacaaaaaaccccagaaatatgttttatagggaaacactaaaagcgtgccctgccgagccagaaattttccagggtgtccactactgccattttatctaccattgtattggaagtactagtcaacacagttagttaagtgatcagaaatacgaagtttcaaaactggaaagaataggtaaaatgatcacgtattctgcagatgatacaattgtgtacctggaaaacctaagacaattcccttaaagaaatcatgaaaaaagaaaaatttagtaagggacagggtacaaaaatatttaaaaaattaatgggatccacctacttaaacaataaccagttagaggatacactgtatttaaaacaattataaataaagtaactaggaataaacttagtaagaaatttgcaagatctttctgaagaaaacttcagtaaaatgctactgagtgacataaaaatgacttgaataaaggaaaaatgtatcatgttcttgaagaggaagacgaatatataaagatgctaattcttcctaaataaataaaaataatatcttttgaaataaacaagttcatttcaatatccctatgaaaagtaaactgtgagtaatagccaggaaaaaattgaaatagaagaatagaggagaggtattcattccatcaaggtactggattacaaactgactggtattgggatgactgaataatcgtttaggacaacaagttaacttaatcaagatctcacactcacattagggtgacttttaaatggatcaatgattttaatttaaacattaaactataaaagtaatagaagaatcaatgctacgactcatttataactgcaaaattggtctttctaatcatgacacaaaactcagagaagagactcatcaaattgactatgtggaaaaaaatgtacacagcaaaaaaactatcacaagctaagaaaaaagaccaacaattaatgggcaaaattatttgcagtttatcgagtaagcaactaaatctctagtaaataaggagcttctaataattgaagaaaagaccacaatgcaggaggcaaatggtgaaggataagactggactgcctacagaaaaggaaatacaaacggctggcgcttacacacgtgaaaggttgctcaggctcattcagaataaattcttccaaaaacagttttttggtgtgagcctactatgtgccaagaatattgaccttctgggtatagaaggcagtgaatccctccccactactccccagaaaaaaaaaaaaagaaagaaagaggcagggaatggtggctcatgcctgtaatcccagcactttgggaggccgaggcaggtggatcacttgaggtcaggagtttaagaccagcctggccaacatggtgaaaccccgtctctactaaaaatacagaacttagccaggtgtggtggcacacatctgtgatcccagctactcaggaggctgagacagaattgcttgaacccaggaggcggaggttgcagtgagctgagatcgcaccattgcactctagcctgggcgacagagtgagactctgtctcaaaaaaaaaaaaaaaaaaaaaaaaaaattcccagagaaggttctacagtatttctgtaccagtgtttgatcatcttcatggacaagaagcataattttcttgaatacactaaatctccctttctgatttctcttcttaagtagcaaccacccaaacttctctttaaattgtaggtcacctcggctgggcgcggtcactcacacctgtaatcccagcactttgggaggctgaggtgggtggatcacctgaggttgggagttccagaccagcctgatcaacatggagaaaccccgtctctagtaaaaatacaaaattagccgggcatggtggtgcatgcctgtaatcccagctactcgggaggctgaggcaggagaatcacttgaacccgggaggcagaggttgtggtgagccaagatggcaccattgcactctaggctgggcaacaagagcgaaactctgtcttaaaaaaaaaaattataggtcacctcaatttcacctgtgttcagggctttgtatcaaaagtagagatgtctatgaaacaaaaactcaattctcaatataaaagctagaaaaacaagaccgtggatcttaggagaatgaacgagatgtcatgatgtaggaaataaagtttcatcttccacctcgaagtcagctgaggataatattagaagaattttaaaaagtcatacagtcatgagcaggaagacagattagaattcatctaatttgtgactttgcttcttggtaaaattgtccctgagatcaaagacatcattaatattctccttagggacatatttcaacaaaatgtgatagaataaaatgtttgcagtcagtttccaaactaagattctttgcttgctacttgacactggactttaaatttgttctctacgttgtcttccttaactatgcttcaggtatttgtgcccaggacgtggggtgaggagttgagagaaatgggtgaaaggtgttagagaggtaggcaggaaaattagtgagggtagaaagtcccaaaatcctttctagaggtagagcatgcttctcttgctactcttactacattagaataagcctgtctctttttgctatttactacatatagactaaaacagttctccttcttaaatagcagagaccacgcagaggctgcctttggatcaagtccaggaagtgcttcccccaattccagaactataagttacttccacagtgcatcagtgagatcaatatacacggtgagtgatgattcggctttatcgacttcttcattataaacacagataaattcaaggatgcacagttgatcccaaactccatttctatctggtaggaggtagaaaatgatgaatttgcaaagtcagttcatatgaattagatgacatgaaataaaatgactattttctctaagatctaggaaggatcagtagatggatctcttagtctgttaaactaatctgttagtcttttaaactgctcctgagatgatagcttatcccttggccctgtttttccggagttgagccataacttagttagactatgagaaaatagagaatgagatgtgtaaagcaaactgcctcctccacaattattgaaataaaaacttctctaaatgtaacatctgataatctaaattaatgcatattgatttccatgaatttaagtctaaaagtatggtcaaaagtgttgaaatttttttttattcattcatcaaatctttcttaagtagcaattatgttaaaggcactaggaatagccattgtagggggtataaaaattataacagggaaggggagggaaactagcatttataagcatcccacttattgtgctttgtggtaattggttatatcatttactcttcagaatacgtgggtggtttttcagtcaaggtcctatcaggaaattgatattgcactcaaattgaataatttgagattagtttaatgaagggcatattaaactagggtgtgggaaaactaaaagggagaatgcagcaccctgagactaggaagagtggggccctgctactgtctttaagactaaaggggaaagaaacccagagagacagagacagagacagacatgcatgcatgtatacacacacacacacacacacaaacacacacacacagtgtgtgaggagggctgtcctacaggagctgtgacatttggtcaagggacactatagcctggggtcaccctgaaaagagagaataactatcctaactttgggaactcttttacactgttggtaggaagagtatagccactacagaaaacagtaggatatttctcaaaaaacttaaaatagaactactcttccattcagcaatcccgctactgggtatctacccaaaggaaaataaatcacctcagggtgtggtggctcacatctgtaatcccagcactttgggaggctgaggtgggcaggttgctggagctcaggggttcgagaccagcctgagcaacatggtgaaaccctgtctctacaaaaaatacaaaaattagccaggcgtggtgacacgtgtctgaaatcccagctactggggaggctgaggcaggaagatcacttgagcctgggaagttgaggctgcagtgagctgtgttcatgccatgccactgcgctctagcttgggagacaaaatgagaccatgtcttaaaaaacaaaaaaagaaagaaacggaaaaagaaaataaatcactatagcaaagggatacctatactcacatgtttattgtagcactattcacaatagcaaagatatggaatggacctaagtgcccatcaacaggtgaatggataaacaaatgtggtgcatatatacaatgaaatatttgccataaaaaatgaaatcgtgccatatgcagcaacttggatgggactggaggtcattatctcaagtgaagtaagccacggacaaaaaggcaaatatcacatgttctccacttgtaggtgagagctaaaaaagttgatcacatggaagtagagtggaaagatagagaacagagactgggaaaggtaagttgtggggagaggatgaagggaaatggattaaagtgaagggaaatgggttaaagggtacaaatgtacagtcagatagaaggaatacattgaatgtgtgaaagcacagtagcgtgactataattacacaaaaatgtattgtacttgggcgacagatatcctaagtattctgacttgatcactaatcactatgcattatatacatagaacaaaagttaacaggtaccccataaatttgtacaaacaaaccccaactttgccatcatctcttcctctaatgtgctagtactcccccattgaccaaacccagccagagccagagggcactggagcccagcggaggcagttatgtaagttggcctcccagggcaccaagtagggtggaaacgagtggagggcagattgggagaggcagccaaagggatccagcgtcgatggctcaatacgccaaattgaaacttagtgccaagaatctgtctgtgttcaaggttaaagagaggcaggtcttagtactttgggtctcagtgcaaccagggtctgctgttggctcagaaattcctaagtagcatatagtgtagtcatatgattgtgtcaatgaaatattactggatattattatgctcgagacctctcattctggttgttcattctgggatgcttatctttgcatctgaagagttcctctttctttgttcattcaccaaatgatttttgaccacctactgtatgttgagaatcctactcattggcaaaaacaacaatgtagtcaatggaggagtcagattagagaagccctaattccaataaagactcaagtaacatgataaaggtgttcacatgtgaagagagggacttggggagcacgatagagagactcctccttcagaggacatgatgcctagcgtttagatgttcaataaggatttgttgagtaaatgaataaatcccaatttctatgtctctgtgttagaatcatggaatgttataattgaaagaaactggcatgaacacttacactttcatttgatagatatagaaaataaaccaaacatgctgtagcagcagaggttagtggagactctaggtttccttggtcctaggctgagaagtttgttatcactgagcacaatgtcttcttagggatataatggggggtgtcatggcgtaacacagaatcagtcctggggtcaccctgaaaagggagaataactgtcccaactttgggaactcttatacactgctggtaggaatgtaaactagtatagccactacagaaaacagtatggagatttctcaaaaaactaaaaatagaactactgttccatttagcaatcccactactgggtatctacccaaaggaaaagaagtcatggaagggtgtggtggctcacgcctgtaatcccagtactttgggaggctgaggcggtcaggttgccctgaaagagccctgaatcagagacttgagaacattttttggtggtcttataagccatagttttaacaaacggttttaaaattgttttctgcccattctaattcaagtaacacttaacaaaatttttgtgtgaataatattttcttgcttttatttaaatcttcagaatatccccgggcaagttggaccgagccctttgaagaatactcagaagtttattttgtgaatgagtagactggaaaatgtttgtgtccagctgaggatgcacagttggaaagcaggaggaatgctgactggttgatgaaaactagcttaagagcattcattcgctccatgagatcaagggaacaagagtgtttgcaagaagccattatgagtcatggaaaaaaagatgatgaaacccatggaaacagcaagagaattcccactctctctcttcttaaaaaaaatctatcattatacagcacagagtggagccaagtttttaattttgaggaaccaaaaacaggatcaaatatgaaaaccctttcttttattgggccacattgtagatgctgatttgataattgtttcctatgcagatagattatttttatttcacagattatttaaaagggaagagggcctggttgtttatttatatgtttgtttgcatttatgaatcttgctgccttttagcaccaggatgtttttaaaaaaattcaaagaggccaggcgcagtggctcatgcctgtaatcccagcactttgggattctgaggtgggaggatcatgaggtcaagggatcgagaccatcctggccaacatggtgaaaccctgtctctactaaaaacacaaaaattagctgggtgtggtggtgcgcgcctgtagtcccagctcctcaggaggctgaggcaggagaatcacttgaacctggcaggcagagtttgcagtgaaccaagatcacgccactgcattacagcctggtgcagagcaagactctgtctcaaaaaaaaaaaaaaaaaaaaatcaaagataccaataaaacgaatttaaataaaatacttaagtactttaatagcaaaacgtttcctttgattcttttggctttcatatttgttatagccattgttaatgtcaagcataattatagttactaataacaataaaaaagcacatatagacaagagggcagctcttgacattaaaatataaacatgcttttccagagttaaggtggaacttaatctcctggccatcattatatggctacagttgcttatctgagttgatttacaggattaactgcagggtcagatttaataatcagtgatggggttgaggacacgctgccccaaaatatggcaccttggcaaactgaattttttaagctgaaggatttgagaaaatggcaaattttaagtggaaatattactctgaccttcctttgccacctttctccccggaagcaggtaataaaacctttgctgaccttcctctaaaacacatcataggaccctcatgtgagaggtgctcttcctgtatccacagaggaaaggcagttccctatctcccaagacacagggacccagaggagaatctgaacaaacgggctctgctaagtttccctccatttattcctattagatctagtactctttttgcctgatcatatttctgcaagtgtctctccattcttcatcaaacctactactaaaaacactcaagtgtaactgtttcctctgatcttcacttcctgaggatggcccttgtgttacgtagaacttgtttaaataaaccactatgtttttctctggttaatcttttattataaaggattcagctctgaatttaaaagggtaggaggaaaagatatttttcccttcctacataagcaatctaacaggcatgaatattccagcacacagaggtttttttttctggtattcgattattttttctctagatcacaaattgagattctaattgtaaaatttagagattgaagatttcgcaaacggaattacagtagtctcactttttctggtctgtgtatccctaaataataggtgagtcaaactcaggtctgggatttttcagcggtagtgaaggggcattacaccctgtgaggtatggatattatgcaatttctcagaagccaaattattgtttccctacacaccacctcttatgttctgaccaatgacttagaaatcaatgagaacttggcttgcaaaaagcaaacataaagcttcgagtccagttaaattgtggcagctttcaggaagctaatttcgccgattcattaaaataatcgacttttaacagatactgtgacgcacgcaaagatgtagatggcctactctgcctacagagaatttacactctggcagaggagacaggatgtgtacaccactggtgaaaatactggacacaatacggtaagctaagtgtcaattgcaggatgcatgcttcctgctgagaatttacaagccaataggatcacttccagttgggaggaattagggcaggcttttgagcagggttttgaagatggcttttcctgattctcagaatcaccaaacctctcaaataaacacgttctcagcccccatagcccttttcatacctgttactttgtcattatttttgtggttacgaattaatgtctgtcttcccctctagactggaagctgcatgaggacagggaacatgtctggttctgctcaccataaaatccccagcagctggtaaggtgtttggctcacagtaggttctttgtaaatatttgttgggtaaagcactaggccgggtgcagtggctcacacctgtaatcccagcactgtgagaggcaaaggcaggaggattgcttgaggccaggagtgtgaggctgcagtgagctatggttgtaccaccgcactccaacctaggcaacagagtgagaccctgtctctgaaaaattaagaagacctatttatcgagccttcactctacacctggcatgggccccgtgtactctcatttattcctcacaatgatgccttgaaacaggtgtcattctctctgaggaagctgaggccaagtgaagctcaccaatcctattgattgatattcttcagtcttaggttggtcaggctgcaaaacctgtgcagcttctacaatctgccttgtggggtagagacagggcaaagggagcaaaatggatggagggcgtgcctgagagaagtggctgcggctgagagcactgtcaaagatgtcttcaaggagcgcaaggaggctgggtgaactgggccctggaagaagacatctcactggagttgttatgtggtcactggttctgtgtgcctcccctagcctggtagttctgtccccctctccatacaactggccccagtaaaaaccaaccagtggtccttggtgcctggtatgattgaaggcttcccattgacaccactagcttttcgtgtaccctgctttccagttggttccaaacttgaccttgacccacccataccccctccctatgacctgtggcttagtcctgtgttcgtggctctcactgcaggctttcctccccagctgtaagccacactcacctccttgacctctgtgtcctgctaagcagccaggtccctagcctgcctttcaaaggattcaggtgtagattgaagagggagagaggaaacatggcaccatgcaggagtctttcagtcattaagcacacagtggaattagagtgacaaaaagaagagatagaagagaggatatggatggagaattggtggtgcttggtaagtgatttgatgcaggggtgatagggtaggcagagaaaggaggagagatgagacacacatgacaaccttccagactcccgtgtgcagaaaataaatattgcccaaacttatagctagtttttagtttctagaagaatttttattttccaggggatttctaccaaactctgtactttcatcctagcctgaagttggactcttccctctcctatacttagtcatccctggatgaaatagtcattcagaccaccttcttttccctgcctttttaatgattgttacatttgccctttcctttcatctttataaatcctttacacgaaaggcagataggccaccttgtccatgaagtttcccctgctcaccccagatggaacaatgtctgttgtttctgtgtttttctaggatttagtcctcttatcatggtacttctcacatcttgccttgtaccacagctagttgtattcatttctctttccctaccagactgtgagtgagagagggaaccatatcatctccagcttctgagtctctgatgataggtactcacttctctccaacctgcttctcccaagcaatagtcatctgggttaatggagttagccagatgttggctgtagattcaggttatctgtaaggggatggaattggaggcccacacatcagggccttctagcccaaggataatgttcttttataaacttgggggcaggtgtatgagagttcattgggtcacaattctatatagcttatatatattgtaaaatgaactttagtacctacttaatatttagtaaaataaaattcaaaaatagacaaatattgtactgaattgcatccatccttaccttctccttctgtcagtagagaactcctgtctgtttctctctctctgaactatcttcctttccctttctgtcaaacattgtggaataaagacttggactcaattttctgacacagtttattctcataatttgactccatttacttccttctctgtctccttgtctattttacttctttttctgtctacatgtttcttcaccatctccaactatttgtactattatgatggatggcaatcttaggataatgagtggaaaggagttcttaagttttgaaaatttaagtaaggtgtattaccagattaacctagagccatgaaaactaaaatatacatttaaaaaatcttctgtgaactgggaattatgtactttggtaaaggttctgaatagacttcttttttttaaaagaagacataagtatatgaaaaaatgttcaacatcactaatcatcagggaaatataaatcaaaaccatgctggggtatcatctcactccaagtcaaatggccatcctcaaaaagacaaaaaataacataaatgctggagaggatgcagagaagaggaaactcctgtgcactgttggtgagaatgtaaattagtacagccattatgaaaaatagtacgaaagtttcttaaaaaactaaaaatagaactaccacacgatccagcagtgctattactgggtatttatccaaaggaaaggaaatcaatatatccaagaactacctgcacctcagtgtttattacagccctattcaaagtagcccaaatatgaaaccaacctacagatccatcaatggatgaatgaataaagagaatgtggtacatatatgtattagtctgttttcacactgctaataaagacatacccaagactgggtagtttataaagaaaaagaggtttaatggactcatagttccacatggctggggaggcctcacaatcatggcagaaggtgaaagccatgtcttacatggcggcaggcaagagagaataagagccaagcaaaatgagtttccccttataaaaccatcagatctcatgagactgacttactaccatgacaatagtatgggggaaatcgccctcctgattcaatgatcttccactgggtccctccccaccatgggagctacaattcaagatgagatttgggtggggacacagccaaaccatatcagtataaacaatggaataccattcagccacacacacacacacaaataaaattctgtcattcacagcaacatggatgagcctggaggacatcatgttaagggaaacaagccagatgtagaaagataaataccaaatgttctcactcatgcaaaagctaaaaaaaaactagcttgtagaagtagagagtagaattgtagttattagaggttgggaagggtagagagagggaaggatagggagagattggttaatggttaaaaaattacagagaggaagtcactgtatagtcactacaggatggctatagttaacaaaacagtattgcatatttcaaaataggtagaaaagaggattgtgagggttcccaacacaaataaatgataaatgtttgaggtgatggacatgctaattactctgatttaatcattacacatgtatcaaaatattactctatatcccacaaatatgtgcaattattacatgtcaactaaaaaaagataattcttctgcaaatagtagaaggtccaagtgaaagtgatttaaatgatgaggagatttattatgttatctaatgggaaattctaaatagggtgcttccagagttgcttaattcaagactcatcatcaagcactcaagttctttcttctctttcctctttgccatcttcagattgttggtgtttgtgttcatgcttcccttctcatggtttcaaggaaagattatattaaatggtggggccatagcagcaacaatcatcacatctttttttttttttttgagatggagtcttgctctgtcgcccaggctggagtacagtggcgcgacctcagctcactgtcacctccgcctctggggttcaagcaattctcctgcctcagcctctcaagtagttgggattacaggcacccaccaccactcctggctaatttttgtatttttagtagagacggggtttcgccatgttggccaggctggtcttgaactcctgacctcgtgatccacccgccttggcctcccaaagtgctgggattataggcatgagccaccgcacccagcccaatcatcgtatctttacaccttgatttttcttttttagttacctaggctggtctcggactcgtgggctcaaactatactcctgcctcagcctcttgagtagcttggattacaggcatgagccaccacacctatagccacaatgtcctctatccaagtgaagaaacctttacaaggagtctcctccatccccagcagatttattctcatgtcagagcatctagagcaaggtcacagagctacccttaaaccacccaatggcagggggtatgggaccatcatgactaattacaaccaatcaggattaacctgattctcaagttggggaggagaattgaccatcagaataaaaacagggctctgtaaacacggaagaagaggaaaatgactcttgggtgcctctgtgaatgttccttctcacatccaaggagatgtgcaaagacagaaacaattttttttttttttgaaatggagtcatgctccgtcgcccagagctggagtgcagtggcatggtcttggctcactgcaacctccccgtcctgggttcaagctattctcctgcctcagcctcccaagtagctgggattacaggtgagcgccaccatgcccagctagtttttgtatttttagtagagacggggtttcaccatgttggccaggctggtctcaaactcctgcccttgtgatctgcccggcttggcctcccaaagtgctgggattacaggtgtgagccactgtgcccagccgagagaaacatttagaacaaaacacagacttgtgttttttccccccagaacaatctcttgaggcatgcgaaggctgttctgcaagcatgtgtcattgtctaacattttgtgatgggtggtcacatctgtgtatggatacagtgttgtcatggggccaatatctctatccaaagttacatctgttttcagatgggctgtgaaaatagtccatcgattttgacttagaaagttctattaatgtgtggtatcacaaagacagacacaacatttgtagtgaagagctgcccagtagtcagtgcacttctcataatcataccccaatgtcctcttagggaatcacctctcacaggttgaacaatgtcttggtgggactattcatcaagggttcttgcccaccagccaatgagtggcatgtgacttgagctagactaatttgaccctctatcttaggactttgagttttggattcagtgaggtaagggtggaaaaaatgaagctcattcacttcagtaacatagttcagttattcctgcctctaaaccccaaacacatcccctatcctcaccaaactgccttggttctagtactagtctgttctcatgctgctaatgaagacatacccgagactgggcaatttataaaggaaagaggtttaatggactcacagttttccgtggctggggggggcctaacaatcatggcagaaagtgaaggaggagcaaagtcacgtcttacatggcggcaggcaagaaagtgtgtgcaggggaaatccccttactaaaactatcagattcgtgagacttattcactatcacaagaacagcatggaaaagacctgctcccatgattcaattatctcccactgggtccctcccatgacatgtaggaattatgggagctacaattcaagatgagagttgagtgggtacacagccaaaccacatcagttctgaacctggttctccaggcttccctttgattctgtgggctaccagtgatattcttgcaaaaatatccttttcccgcgtacgtttccagagttagtttctgttgcctgctggatacatttaacatctattttattttataaagtcataggatgtcagagctgtaagaaatcttatagatctagttcatctccctcattttacagctgaggaagctgatgcccccagcggttgagggtttcacccaagatcacatcacagaggttgtcaatgatggaacttggaaagaagacaaggtctcctttccctagggtagtgcaggctgcttttttcccctaagtctctttttagtgtaaagcacaacttctcttctttttctctctgtgtgtgtttatctgcaatatttaataggagatagtgactttaaaatcctcatttcccccccagactgacagtttgctttgtatagtttaaaggcttgtttcagagatagacctctcagggacttggtatctggcaaagacaggcattagtttatgtccctatatggagccttgcttctttccagctatctgtaaatgtttattctcttacatgaaattcatgtttggaaagaaagtggtttgctctagggaaacatatgggctagagttctgaaagtgattatctaccatttctaagtctgccccttgtaagctgtgtatattgggaaaggatctcccttcactcacactaaaggatatatagctgctctacattttcagctgctttagggtagccatagctcatgcaaccactgtaaaaaatagcccaaggttgggataggagtttggaagggaatttagaacagtattgactatgtgccaggtaccatatgaagcacctagcatgtattaattaatgaattaatattctcctcacaaggttaggaggtaagtaccattattattacccctttttataagtgaagaattaagtcaaagagaggttaagaaacttgttcaaggtcacacagcttttaagtggcaggattgaaattcaaacccaggcagtctagttttaaagtctgtgctcttaacccactgctctgttgcatcttaatcgctgaatcatggaggtaaaagtgaatcatttctgttgaactcccaacctcaagtgattctcctgcctcagcctcccaaagtgctgagataataagtgtgagctaccttgcttggctatgatctttttcttaggaaaaaaagattgttcaatacagacaaataccttttcataaacacttctagtagagagttctgtattgcgaatctcttgatctcaacaatgcttggaaggtctacttataaaccgtactctaccacaagttcgctacacaacaaacatgctctcatctgtacccatgtaacaaagtacctcaaagaactcaattatttggtagttgtgagaagaattgcacagaattaagctttttgctttggatgctcataaaataggatcaataagcaatgtgttaattgattttttaagagaaattcttttaagccatgtcgagatcctctgtggttaaaaaaaaaaaaaaaattagttacaatacaaaaacacccaagcaatgataagaaaaagtcatggactgagtctctggaaagtcccctttccccttgctgggttcaaaacacgtttttctacttgaaatttcttgtctacagagagaaaggaaatcatctctgttccatttttattttggcaaacaatgtagggcttctttttaagcaatttagcattacaaagttccagtatgtcaaacaaaacaacagtgcttaacgattacatcacagtgagatatttttcttgtgttagtctttattcagtgtagacaattcagtaggaaaaaaaggatacttaaaaaattgtcagccgggcacagtggctcatgcctgtaatcccagcactttgagaggctgaggcgggtgatcacctgaggtcaggagtttgagaccagcctggccgacatggcgaaaccccatctctattaaaaatacaaaaatcagccaagcgtggtagcaggcgcctgtaatcctagctactcaggagtctgaggcaggaggatcatttgaacccaggaagcggaggttgcagtgagccgagattgtgccactgtactccagcctgggtgacagagcaagactccatctcaaaacaaaacaaagcaaaacaaaacaaaaattgtctactttatttctactaactttattctgaca

SEQ ID NO: 964 - DNA, 1561 bp, Homo sapiens
catgaatgtactgcaagggaacacatttgtgtcatgtgaagagacatgacaaaaacagccctccttaaattatttgtggcaatagtgatcacattcattttaattttgccggaatatttcaagacaccgaaagaaagaacattggagctatcatgtctggaagtgtgtttgcaatctaattttacctattcactctcctccttaaatttttcttttgtgacttttctgcaaccagtaagggaaactcagattatcatgagaatctttctaaatccctccaattttcgtaacttcaccaggacttgccaagacatcacaggtgaatttaaaatgtgctcctcgtgtttggtttgtgagtctaaaggaaacatggattttatttctcaggaacaaacatcaaaagttcttatcaggagaggatcaatggaagtgaaagcaaatgattttcattcaccttgtcagcactttaacttcagtgtagctcctctggttgaccacttggaggaatataacactacctgtcatctaaaaaaccacactggaagatcaacaatcatggaggatgagccaagcaaggagaaatcgataaactacacttgtagaatcatggaatacccgaatgattgtatacacatttctttgcacctagagatggatataaaaaatatcacttgttccatgaagatcacttggtatattttagttctattagtttttatatttttgatcatcctcactatccgcaaaatacttgaaggccagagaagagtgcaaaagtggcagagtcatagagacaaacctacatctgttctcttaagaggaagtgattcggagaaactgagagcattgaatgtgcaggttctttcagcagagaccacgcagaggctgcctttggatcaagtccaggaagtgcttcccccaattccagaactataagttacttccacagtgcatcagtgagatcaatatacacgaatatccccgggcaagttggaccgagccctttgaagaatactcagaagtttattttgtgaatgagtagactggaaaatgtttgtgtccagctgaggatgcacagttggaaagcaggaggaatgctgactggttgatgaaaactagcttaagagcattcattcgctccatgagatcaagggaacaagagtgtttgcaagaagccattatgagtcatggaaaaaaagatgatgaaacccatggaaacagcaagagaattcccactctctctcttcttaaaaaaaatctatcattatacagcacagagtggagccaagtttttaattttgaggaaccaaaaacaggatcaaatatgaaaaccctttcttttattgggccacattgtagatgctgatttgataattgtttcctatgcagatagattatttttatttcacagattatttaaaagggaagagggcctggttgtttatttatatgtttgtttgcatttatgaatcttgctgccttttagcaccaggatgtttttaaagattctgaggtgggaggatcatgaggtcaagggatcgagaccatcctggccaacatg

SEQ ID NO: 965 - protein, 292 aa, Homo sapiens
MTKTALLKLFVAIVITFILILPEYFKTPKERTLELSCLEVCLQSNFTYSLSSLNFSFVTFLQPVRETQIIMRIFLNPSNFRNFTRTCQDITGEFKMCSSCLVCESKGNMDFISQEQTSKVLIRRGSMEVKANDFHSPCQHFNFSVAPLVDHLEEYNTTCHLKNHTGRSTIMEDEPSKEKSINYTCRIMEYPNDCIHLHLEMDIKNITCSMKITWYILVLLVFIFLIILTIRKIGQRRVQKWQSHRDKPTSVLLRGSDSEKLRALNVQVLSAETTQRLPLDQVQEVLPPIPEL

SEQ ID NO: 966 - DNA, 59002 bp, Mus musculus
  misc_feature (1)...(59002): n = A,T,C or G
gggagtccaaacatgctgaaggatatagaccatacatgctaaagggaatcagatgcagcctctgtaaagaggcagacaccccaatctacttagctggaggaaatatggttgaaatatatgggcatatttggctcaaagaataaagatttgtggtggggatatcttttcaatgttgggctcatacagaaatacaatagttttgtatctcagagattataatgagaagtgacagatgaacaagtattgagtgaccctagatccagggagtattcaaaagctaataataataataataataataataataataataatagacattcttcatcatcaaggatctagcttttcctgtgacagaacagacactacttttgtatatactcaactagacatgatgtttaatatcagaattaaagtgtttagtttcagaagaatcatagagactaatacatttatgcttagttttcttcttttcctcattctgtttcttaaagtttcttgtagctcaggctggccttgaacatgctgtgggctaccttgaattgagccccctgcctccacctctggagtgctgggactacctgctgtatttaggtaatgctggaggtcagacccatagcttcatgcatgctaggccacagtttgagctacaaacccaggcccctcttttgttttctcacttgaaatggggagtctccctctgtagttcaacctagcctcaaaggagggatccttctgcctccacctctggtgtagccacatctcgctctgatacatggtttggaaggacagtgtggaccaaatggcttctggctccattctgctttatgagaaattattctgtgaacttaaaagactgcagagaagcaaactgaatacagcttgcattttatgtttcagtgttgaatttaaatcagataatatttaatcagacagtattgaagggctgtaagagaaccctttgggttttattggatttatgatgaaaatatcttggagacaggatctgaattaaatatgttttcatagtgtgagatgacctagaaaaaaaagggaagcaaatggcttcatatacatagccaccttctattttattaattgagttaattatcctgctggtgttgggaagatagaggtgtcagtaacccacatatttgtctggtgtttcacttgtttgttattttgagagagtcttgctgtgcattcctggctggcctggaacttgctatccctcccaggctggcctggaacttgctgcagtcctctggcccctatcttccaagcactggaattatacatgtgtacccccacacctggattctactggtatctagaacatatggtgaggaaacatactacttagatccaagtcctgattctaatcataactccaccacaatcaccaccgccgttaccactactcccatcaccaccaccaccaccaccaccacctctatcacctccttttctttaggcagtcttttgtggcctaggttagccttgaagatactatgtagctaaggatgaccatgaattccagagcaactttcccctacatcttgaaacactgagaccatcctgttggggtttattctgtacttcaaaaacagacccaccaacttcgtgcatgctatgaaccaccagttttggtaatatccaacgggcaaagtgcataaaacagtgccttcctggtatggttttagtggttcataactataattctgtatttgggaagctaaggccgagggatcaaggttatcactaactacacagaaagttcaaaaccagtcccagctatctgagttcttaccttaaaatcataaaaacagaaggacgagagagctgcctcgggtaaaatggtttgtggccttccggaggaccagagttcggataggcagcacccgtgtggggtggctcacgactgcgtgaattccagctccaggggatcatatgccttactctggcctctgtggcacctgtagacatgttgcatacatccacacagacacaggcacataagtaaattaaaaacataaataaggcttgaacaaatcaataaaaaaaatgagaaaaacaaattgtattttaaaaggtcaaaatgaaacctaacactttgctcatttaaaaattaagacgtttttaaaaggagagaaaaaagcaatgcctagaatattttatagaagcatttacttttgcccacctaagtaagttctgcggctgttgagatggttcatcgggtaaaggcacgtgtgaagccgggtgacctgatttccatccttggagtccctgtggtagaaaaagaactccaggaagtttccctagccccccccctcccccccccgtgggctcacacgcatgtgcatgagaatatttgtacttgcacaaatatataagtaaatgtaataaaatgcttattaaatgttctgcctttatgaagctccaactctggtttagttttaaaatgtagcacatgtaaacacctatatagcaagtatatatgatatcttcctgtgtagctcaggctggtttcaaattcttgatccttcaaatccttttttcttttcttttttttctgagacagggtttctctgtatagctctggctggcctggaactcactctgcctctgcctcccaagtgctgggattaaaggctaagattacagataggtgccaccgtactgggctcctgatgtacttcagcttaatattttttcccctctaccttagtcaccatagttgcggacaatgaggaagacttctgttccaatccagagggttttcccaaacctgtgtgatttacctttcacagtcaccaaaggacctgtgttacctgccacaatttatagaatgggtgccaaaactctgggcttgaggctcatactacaaattttaggccatgtgtatgttagtggaattagggatacaatcagtttgatccaacggaaaagctgcacttgaaaatggagatatatgaattaccaaaagtcatagtgtcctggtggtggtaggtgagggtgatgcttgcaggttaggtggggcccctgggcttctcctctgggggactcacaagtgcacacctgaccgtgtcactgcctggatccacaccctcttcatccttatttttaggatgaccttcagacctgtttcaaaggccaaatttccaccaactttgctggcttgatctcagatttggctcttctcgttatggcctactccctggccttggctagcttctttccgacctcaggggctttaattgtgattttctcactgactggaactacttcctctttttttttttaaataaagctatccttccccacagcatactttactttagcatgtcgtcagcttaaatgcctttttcccagagaattctcagtatttcagagtgagctaggtctctgggccatgctcatggacctctgtatttaaccacaggactgaccatggttctaacaattataatgtaattgtgtcagctgtctccagtagaatgccatgctctgtgaagacaggggctgatggtgagacaagtcaaccaacatggagatggtatcaagctacaatggtcaaagactcctccagccaagaaaagtaaactcttatcaaggatcaatataatttaaaacatacagctactagttcacgtttcttaatgacagtttacctgtggtacaactgctaggtaaaaccatgcatctttaaaacttgttagtcccaaattttttttaaaaaaggaaaaaaatcacaacagcaacagcagcaacatttcacagaaaggaaaagaacaatatgaaaacagctcaaggaatacatgaaggggtaaaatatccctggggagggaaaaacacggagttttattgaagaaaccaagcagagactggtctgcacaggaaagtgtgtctgggagtcaactgaaggaccttaaagtagggatctatataactcaagaagcccctagttcatgaataaaaatgacaacttgcaagcctaccttacttggctccatttctcattcattctagcctttgcttaaaggcttgaaacacttgaacatttagcttaaggagaaaaataatcccatcatatgtcccatttctgaagccactttagacctggctttgctactagaaaacttaaatataagtctgtggccttgtttaataaagtacccccagtaagagctagaaaacaggggctgaagagatggctcagtcccgacagagttcccagcacccacatggtgctccataacagtctaactctggacttccaggatctgatgccttctttggtctctgagatcactgtatacacgtgatgcacagatacacatgcaggaaaacattcacgaacgtaaaacaaataaaatctaaaagtaatttgagaaatatcagaggacacccagattgggttaatagtttttggtggcactaatattaaagggagaactgaacaaagtctgagtctcaaaaccagtgataattgatctcatggttcaaaggaaaagggggggagaatctaaaaatcataaattcagacatgtctcagatccttgtcctctggatccatgccgccttcagggatccatcactataaatgttcttggtcatctgtctcacttgcatgatattatttctcaatacagaacaaaccaacctaggttcactgggattccaggagaattcagtgattgtggctgtgtgtcctccatggtgggctctcctccacttcttgtggcctgttcctatctagttttatttaaaccccagccatcccatctacgatcagtaccaccagaagccaaagtagtctcattgtgaggtggtgactgaactcggactatttcatctttatatgatgtactggctggttttatgtgtcaacttgacacaggctggcgttatcactgagaaagtagctttagctggggaagtgcctccatgagatccagctgtaaggcattttctcaattagtgatcaagggggaaaagccccttgtgggtggaaccatttctgggctggtagtcttgggttctataagagagcaggctgagcaagccaggggaagcaagccagtaaagaacattcctccatagcctctgcaccagttacaaccctgacttctttggtgatgaacaacagtatggaagtgtaagctgaataaaccctttcttccccaatttgcttcttggtcatgatgtttgtgcaggaatagaaaccctgactaagacatatgattacagcttgagtttcagatttctcagatcccacaaggctgcagtcttgccagcagatcccatggcaagagtaacctcactataaggactgaaaagcaagcagtctacctcagcagcatgggcatcttctcagtggcttggaagtattctttgagtggctatcacgagtcttgtgtttatgatcatccacaactgaccaggacagatgccaggaaatgtggattacagctgtgtgtcctgtcaagatgggctcagcatccatcgctgttccttcctttgaagctgaactgctgtcccataggcagatgctactgtcatctggagagctaagaacccaccaagatttgcctcctttcagatgctccactcgccaagggtgtctggcttagaaggatgcttgtccaggcaaaatccagattgtcactggatggagtctttcttgcaacgattcaagcaagggttctgagggaatgtaacaagccctgtttacttcttcatggttgatcctgatttctatttcagcttctcgttgacagagcccaaactttcaaattctccttcctaactattgtggtgtgatgcatcaaattgcacatcatcattggggagctagacatgggcaatcacaaagtgagcacactgttcatctgatgtatgtgtccccaggacactccatggatgctgaaatcattcccttcatgtctgctctggtgacatctggaagtcaccgggcagtaaggctggcctactccaggccatgggtcaccacaaaattataaaggaaggggtgttccttttccacatttcgtactcctcattgatcatggtcttctaccgagtagtcaaaggttgcttcctatagtcaccagtgattgctggtgaggcccagaatgggcatgggagaaatcttggggctatatgttgtgggaggggcaaggagactgcccacctggattgagagtggctcaaataagaggaagttatctagtagcctggagagaggaagtcaaagagccaaggaccagcctgtgtagggctcactcctggctctcaggtagctttcttcttgctgtcttctttcatggcgggtaggaagaggtcagggtctctgctgtctctatcaaggtatggatgttcttcttaaaccttcgatgttatattttaaacccatttagctagcccaaagccccatgtccaaagcctgtcatgacgctgaggggtaaagctgatatatgagtcttagggaagggttacagccacagcacatgaactatttcatgtaacccctcataactccatggcaaaggctccagtgagggtgaagaagcttagaaagatagatgtgagggctggagagtcagcaattaaaagtactacctgttcttccagaggaactgggttcaatccccaacacccacacgacaactcacagctgtctataactccagttccaggggatccagcaccctcacacaaacatatcaaacatatatacaggcaaaacaccaatgcctaaataaataaataaataaataacatgtatgggggttgagacagggttactttttctacccttggctgccctggaattgtagatcaacctggccttgaacgcacagagatctgactgcctctgcctcatgagtgctgggactaaaggcatgtgccaccattgcttgactcgttggaggtcttaaatctatgaatgacaggctcctcgccacccagaaggatgagacaagagtattgccacacatctgaagccaacctgggctacatgacaggttctaggccagcctgggctatgaagtgagttgccatctcacccccatcccacccccactccccgcctcaaatagcaactaaagtcttggctcctggggttactgagctgtcctgtttgttttaagccagttgatctgaaggaacatgtgaacgtgaggagcatgaagaggtatacaaaagaagagacatgtttgcaggggtgtgtactgtgggcacaggagagggggaacattttgacaaagactggttcatactcaggaaaggcggagggagtcatttggcaggaagcaatcctggagtgttgggggtggagtttggaattatgatgtcaactattatagagaaatgcttgactcatccttcctcgccctcttggccttgctcccaggtctcgagcccctttactgacaccagcaggttcccccccccgcccccccaaaccggaagaagagtcaaaaagaaagaaaacaactaaaaacaatgacttctcttcacacctcggcaatgggagtcagaccgatctctctgtcggagtccagccagagtgctcctcccacgcaaagtcagtgctgcgagagtgagcttcttgccagtcctctgccgcctaattaactcccagtgttctgccggcagtgccagccatgatccatctccattcagaaaacattcttgtaggttctcctctgaagacggatctgtggagggtgctggagaaagaaggggctcttccagtttcttctgtccttggaaagttgtcagctgggtgatgctcagcggctgtgttgactgagaggtggattctgggttgtacacagcatgcagggtgtggcccatgaccgaaacagacccattttcctcctcctcctccctcatcctttctgcagccactctttgaatgtggccactgggctcttgattactgtcaaggaggaggctcaggaactctctgcagccaatgtgttgaagttgaagtcctgaatgagagtattaaatacacacatacacacgggatcaagagcaagttcacatagggtctctgaaactaataatacttcacggacactgaaacattacacaatgccaaaggaacgtggtgatcttcatggcagagaagcggggaagaatcaagaatgtttcctgttgtgactatatatccctcttctaagcattccacgtacatcaagagactctgtcaagtagcccaagggataggtactattatatctattttattttagagacaaggctctattatagctcaaactggctatatagagtgatgttcaatgcctaattttcctgtctccatctcccacctgctagggttttatagatgtgtgctaccacgccgcacttttgtcttcctgtgacaggtcaaagaccaagaggttaaaggacttggccagggtcccataggaaatgatagagggcgattcaaagtcagccttcagaactaccaagttaagctgcctcctgtgtgtatgctccattggagcctttgacataccctctgactcccacccccctagagaattatggttgcttgccttaatgacagaaaagttactgccagagactgtaacatacatagtcgcgcgtgcacgcgcacagacacacacacacacacacacacacacacacacacacacagctgaccacacagtaggttcagtgtttattgaatgaataaatctgggaaagcataagtctgacgcatcgactatttttccctgcctagctcactgcccttttttttttccccagatctttccaggattaagttgtccagcattttccactctcatgttaacctttgtacgttttctgcttggacaaagacccgtaaacgaacttgaaggatgcgaacactgcgtagagaactgtttgtggacactgggtccagtacaactcctctttcctttccagaccaatgaggaactcttgttaccccatggtccagtttgccgtaggagtccagttctgttcctatgttgtttggatgcttggcagactcttgattgtgaaaccaggtccaaggtgatccatgagtccactgttcctcccttcccccatcccctcttgtggagaaaacatttttcactagagagacgaagcatacaactgcaacttcttaattggaacacagagaacttgtcaactttgttaggtagtattgatggtgagatttcttgttaacaaacaaacaaacaaacaaacaacctgggctaaaaggacagaatatttggctttggagatattttggaaaatcaggtaggacagtagacaggaaagcactgtttgccgggcagtggtggtgcacgcctttaatcccaacacttgggaggcagaggcagggggatttctgaattcgaggccagcctggtctacagaatgagttccaggacagccagggctacacagagaaaccctgtctcgaaaaaccaaaccaaaccaaaccaaaccaaaccaaaccaaaccaaaccaaaccaaaccaaaccaaaccaaaccaaaccaaaccaaaccaaaccaaaccaaaccaaaccaaaccaaaccaaaccaaaccaaaccaaacaacaacaacaaaaaaaaagagaatgcactgctttgttaatctcaagttggcaaagtcaaccaactctgcttcgcatcgtggactaaaaacgttttattaaaccggcagtcagattctctggtccggccaggggcttcgcccgctgtcgttgtttgggctacagattactccagcctggctctaggagtcgagtcggggtcagcgcccccgatcctcacagacgccgccttccgggtcgctgaccctggagccggagggcggggccgcgccgggtggaagcggaggaagaggccggcgtcccgggagcgcgcgagaccgtccgcgtgaacgcgcccgcccgcccacccgcgcgcccgcgcccacgcccgcgcccgcccgcgctcccgggaagtctcgcgatgcggtagccggctgctcctgctgcgggtggctcgggctgttgctgtggttgccggagttgcggcggcgacggcggcggcgctggcgcgggcggcggcgctggcgggggtggcggccccggcggatgttgacattgtgttgttgttcctgcccacggtaatggcggcggtggcggcggcaacggcggcggccgggaccaggtctcctcagtagccggagcccacactgccgagcgccagctccgcggcctccgcgcccgccgcctcaccagccgttccccgcggccgccccagagccagggccccgggcggggggctcgccggctcgggatggcggatttcgatgaaatctacgaggaggaggaggacgaggagcgggccctggaggagcagctgctcaagtactcgcccgacccggtggtggtccgcggctccggtcacgtcaccgtgtaaggccctgcgagggctaggacgaggacgggtggcgaggcgcgggcggggtgggccctgggacccctgggggtcctccttttcttaaacccccgtccccggtgactggcgcgggacgggggccttgggggaagctccggcgatcaggaagtgagaacttgctctgcttccatttgtttaggactcccaagtggggacagacactgcctcccctccctcccacagccccggagcaggccccgtggcccgcggggatgtgtggggtcccagccgggaagatggctctttagggtctgcctgatgggccatcggtacaggctagaggtgcacacactcacacacacacacacacacacacacacacatcttgtgggatccatctttgtaacaccccccacacccccgttattctttgggactctgcctgacttacagcctattgacatatggctcagaggtcagatctgaggtgttaagatcccagtggcagttggtaaatgagattcactgtcgtgtgtctatcacacataacacgtaggggcttcccagttcctcaagagtaaatttctgcaaaactgattcgagttgctgtcaattatgtatgatagaagtatacaggtggacggaaaaaaagaggaggatacatctgtttacaaggaattacaagtaccgagtttnnnnnnnnnnnnnnnnnnnntcacgtcaccgtgtaaggcccggcgagggctaggacgaggacgggtggcgaggcgcgggcggggtgggccctgggacccctgggggtcctccttttcttaaacccccgtccccggtgactggcgcgggacgggggccttgggggaagctccggcgatcaggaagtgagaacttgctctgcttccatttgtttaggactcccaagtggggacagacactgcctcccctccctcccacagccccggagcaggccccgtggcccgcggggatgtgtggggtcccagccgggaagatggctctttagggtctgcctgatgggccatcggtacaggctagaggtgcacacactcacacacacacacacacacacacacacacacacacacacacacacacacacacatcttgtgggatccatctttgtaacaccccccacacccccgttattctttgggactctgcctgacttacagcctattgacatatggctcagaggtcagatctgaggtgttaagatcccagtggcagttggtaaatgagattcactgtcgtgtgtctatcacacataacacgtaggggcttcccagttcctcaagagtaaatttctgcaaaactgattcgagttgctgtcaattatgtatgatagaagtatacaggtggacggaaaaaaagaggaggatacatctgtttacaaggaattacaagtaccgagtttcctgtaatccggtctgttttgggacacggacctaggttggcttctttgataagggcccctgtaaggtttattagcaacatcaaaagtcccaatattattcaaacaataagggatgaaagcattctgaaaggtcgtgactaataaaggaatgtagacttggggcaaataatgagttgtccggaagaaggaagttttgtaacatttccctgataaaatccggagtttgtacaacttagggtattgatactcctttgcagctgctatctccagttgaaaagtcatcgctcaaacttcctgtacttgcatatcactttatcactgatagaaaaaggcagcgagcctgaagctgtctggagcgcttgtcattgttttttggtgtagggtgagtggggcgtgctgtgggcaaggcggtcaaacagtgaggctcctcagaagatcggcccttgtgtagtcatcctgactagccttgttgttgttgttggggtgtgcttatgtaacaccttggtgtcttcgcacctgttaacgtgtgcatttaggtgatttaacagggtaaaaacactgcataagcattgtttcagtacctggataaggagatgggacttcgcaccataataactgctctgttttaactgtcaacacaaacttaattaaggaatatagctaattatgaataatacagtttaaatgtatatcataatgcttttagtgttataacctgctatttaatttttagtttaactcttaggacttttttctttttcttttgaacttaaggactatgggtgcttttaaaagcaattacaaacaaacaaaaaaccgacacagtgatagtcccagtactcaggaggcagaggcaggtggatctgtgagttgcagactcccctggtcttcagggctacataaaggatttctgaactttttcatgttgtctgtggtcatccttaaactcctcctgtcaaatcaaagctggcagaaatttatttgcagaggttcagctagggctggagatgtagctcagtgttagagtgcttgtcctgggttcagagtaaccaaataaggttcaagtgcagttgtcatgtctcttctgttcaagaagaagaaaagctaaacatgttgttgggaaatagaatagtcaaagtgctcagatagaaagttggattgtagttgactatttggagtggttaacaagtgtgtgaagtaattattagtggtcttttcatcttgtctttcagaatcacctggcttgtgctcaggaactactagcctttattattataagcattagaaataaagtacttccatttgcaggactaacagtcatttagtctagtttatctgcccattaagatcatgtggggagcatccgctggtgttccagccctctttttccaggccagtggccacatatgagtggagctcttgttcatgaataggcttggatggggttggaggaaggtcttggaggtggttttgattgtacctcggaatctgctgcagacactagtgatggtggtgtttgccacctttgcaggaagccttagtatgtttgtgacctcccttagacacttctgataggtagtaaccttcctctgccacttttatataaatcaatcacttgtgtctcctcagttcacaggatgacagctttagttcatacctttccagattaaggggtgagataatgtatacagagaatacgtgagtgtgtgtcttgtgctcaggaaacactagcctttgttagttattaccctcctcaggtggcgctctgctttgagaaacatttgtgtaaaatatagattaagaattcaacattgccattttcaaaccaaaccgtggttcatttagctaattctctttttactttgaaccaacttttggtcagcaaaagccaaaccctgttttgtggtgatacagaattctataataatgtaaagcttatgtatgaccatcatgcataatgttaggcatactagactatgtagccaagtttgcacctacaagaggctttgaaatttgtgcttatatgttataacggtttcactttccttttcaagtataatcggaaaagtgattaataattacagtgaaccatgggctggaaagatggctcagcagttaagagcatttgctgctcctacagaggaccaggttcggttcccagcacccacatggtagcttacaaccatccataactccaattacagcaggctcaacaaaacactcatacacaaagataaaataaacaaatctttaaaaattaaaattatagtaaaccacataagcttacttctctttttgctaaggagttggttaaagcatttctcccttttacttttaaagaaacaatattataaatggttacagtattgtctgtctgtaatccaggtcagactgaaaagattcaggtctgcctgtgtgcttgcttttgcagttgagcctgtcttgtcttgtcttgtcctttcttttcttttcttttcctttcctttcccttctcttctcttctcttctcttctcttctttctttctttctttctttcttttttttttttttttggtttttcgtctaatttttcttaataagctcactagtactctaatttgagaaatcattttattcttttgtgatacgttctttctagatattctagatgagtaatgttttttatttttgatttgcatgtgctaggagaaatcttttgaagaaacatattgaagaaaaaaccatttatgggaaaagaaaattataaattcccatggtttcatactaaatacatacctataacttggaagactggaagaagaaagaagtggcaaacttactagatactgctggtcaaactgattgatactctttattggaagggcataagcaatgtaaaacacactgacgtaactgatccgtatttatagacagtcacagctcaacatactgctgagtctagaggaaccagtgtgatcattaccagacatatcacataatatgtcagtatttactaattttagtccaacctatttcttttatactctaaactaccttcattatgttgtttgatgggatagaaccacagcaaagccatggtgcccaagatcagccagcttctagccagttaggtttagtagttgttggtagctactcagaccatgttgaagaacagtttagccagccaggggccaggcccagaaactgtgaaagggacatacaaatgactttgctggatggcactggtttataattttaatgtttgtagaactttatctcagatttcaagctgtttttgagcatattctttactctgtgtgtgtgtgtgtgtgtgtgtgtgtgtgtgtgtgtgtgtgtgtgagggcatgtgatcctgtggggaaggcatcttccctatgggctcctatgggtcaggcttggcagcaagtacctttgcttactgagccatctttccaaccctactttgatgtctcataaggatgataactcttaaggaatgtgtttgtataaaagaatttttaaaagttgaggaaatgaatttaaaagtaattcaaagcttgtgttagctgataatctaccattgttgtgtgtataatagtcattggtatcttatttcagactcatcccgtatctgaaccagacttgaggctctcctagagtaggcctcatatttgatttttaacttgagttttctcattaatttgttcagtaaaataaaaccctttaatcccagcattcaggcaaaggcaggcaggtctcttgcgtttgagcaagattggtctattttagtgagtttcagaccagccatggttacaaagagaaatcctagcttatgaaaaagtaaataaacttaaacaaagtaaattacagaggcaattagtgtgatgaagaatatgaaggaagacaggctatgcatgtgttttaataggacaactattcaattttaatgggtgaactttgttgaagaaatgagaacaccagagccagctagtgtctcagtgggtgaaagcccttattgcacaagcctggtgaccaggctgggtccctggatccctggaaccacacaaaggtggaggggaagaactgacacgccgaattgccctctgaccccacatatccactgtggtacacattctcccccctcccccccaaaataaaataacataaatgagatatgtggtaatgagctgaggtttcaaagttttactgtacttgaacttgaaaattaacatatggtttgaattcagaggtttagttagatttgagcttatctagtgtgaaatcgacaaatactttaatttttatatgactggctaagaagaatacagggactaaatcatgaaaaataaattgtgcatacttatttatgttgataaacaatactccaaacaataacttaaataatacagctctaaaattttgagagacaccttgagtttatactgttactatgttacaggccctgagctgaggaagagctcagctccggaatcttttaaattagatgtactgactgatggatgtaatgccagtggagggagggagaccactgagagcttgaagctagcctgcaatagagtgccgaacggcctgcctgcatgcctctgtttgtttctgtctctgtctctgtctctgtctctgtgtgtctctttttgtagcctgctctgacttgaagctcaaactatcctcctgccttagccaccactcctggcaggtttttaattagatagctgtattaaattttgttctcagcaaggttaagccttaactagaacttgaacaactgatgctcctgagcatctgtacactactgtactgattttccgtagaagattcttttgctcacttgacccagccagagtcatcaggctgagagtctaggatatgtgtatttatacaggatcttgataggctgctcttggactcctgagctgactatggtagtttagccttctgagtgcctaatgagactctatgtgtttcttgtatcagacatattttatacataatggatgatgccctggaaagatgccagtattggtttcgatccttggatacgtcctaattgaccatagacgaacttctctgatcttctgtttgctcctttgcaaaggggataatacctactttggaagttaggtatgagaatcagaagtacaactgtaattttatgacctggactcatcatagggattcaacaaattaatttttatcatgattttatttttatccctgtgtacacatgatttcattatttttttaatgagtattttttattagatattttctttatatacatttcaaatgctatcccgaaagttccctataccccccacccccctgccctgctcccctacccacccactcctacttctaggccctagcgttcccctgtactggggtatataaagtttgtaataccaaggggcctttcttcccagtgatggccgactaggccatcttctgctacatatgcagcgagagacacgagctctgggggtactggttagttcatattgttgttccacctatagggttgcagaccccttcagctccttgggtgctttctctagcttctccattgggggccctgtgttccatcttatagatgactgtgagcatccacttctgtatttgccaggcactggcatagcctcatacgagacagctataccagagtcccttcagcaaaatcttgctggcatatgcaatagtgtctgggtttggtggctgattatgggatggatccccgggttgggtagtttctgcatagtccatcctttcgtcttagctctaaactttgtctctgtaactcctttcatgggtattttgtgccctattctaaggaggaatgaagtatccacctgttggtcttccctcttcttgattttcttgtgttttgcaaattgtatcttgagtgctctatgtttctgggccaatatacacttatcagtgagtgcgtatctaatgacttcttttgtgattgggttacctcactaaggatgatatcctccagatacatccatttgtccaagaatttcataaattcattgtttttaatagctgagtagtactccattgtgtaaatgtaccacattttctgcattcattcttctgttgagggacaatcctatatctgatagggggactaatatccaatatatacaaagagctcaagaagctggactctagaaattcaaataaccccattaaaaaatgaggtacagagctaaagtaagaattctcaactgagggataccaaatggctgagaagcacctgaaaaaatgttcaacatctttaatcatcagggaaatgcaaatcaaaacaaccttgagattccacctcacaccagtcagaatggctaagatcaaaaattcaggtgacagcagattctggtgaggatgtggagaaagaggaacactcctccatttctggtgggattgcaagcttgtacaaccactctggaaatccgtctagaggttcctcagaaaattggacatagtactactggaggatcccgcaatacctctcctgggcatatacccagaagaagttccaactggtaataagaacacatgctccactatgttcatagcagccttatttataataggcagaagctggaaagaacccagatgcccctcaacagaagatttcattattttttactgtttgaaaaaaagaaatcatccaaaatgtggcttattactttcctgctttctttttactttcttttcttttcttttcttttcttttcttttcttttcttttctttctttctttctctcgttctctcttcctctcttcctctctttctctcttttttcttcttttttttgagacagggtctctccatgtagctttggttatctttgaactatgagaccccccccccccccttcctgggaatttagttcggtactgttttttctactttaaaacaagatcttggacatgaaagcagatgaccagattgactaaaggaatatttaatccaaagacgaccttatgggagggtccctggaggctgtgttggtttgagaactgcccttttccaatggcacagttgatctgtgtgggctgctgctttgcttcctgccactaaataaactgttgtactggccagtgaaacattccatcttacaagaggactatataaggaggcggttactctagattctgaatttaagaactaaattttttttggtttgtttattttgtttttctagacagggcttctctgtgtatctctagctgtcctggaactagctttgtagactaggctggcctcaaactcagagatccacctgcctctgcctcctaagtgttggggttaaaggtatgcaccaccacggctggctctaattctttattaccaccttatatttggcatatgtttttttgtttgtttcattgttgtttccaaacctgttttatgtggtattggggagcagggcccgggcttcatttactctagacaagtactaccaattgagctgtgtctccagctccacagatactccttaaattcccatttcatgtcaggtgttatacaagctttcaaaagacataaagactttcccatcatatggtttaccgtaagtagttgagttataaatgaagaattgctgtgaagatgaccagtgaagggatctatgatggaaagtaatgtggttgggagaatggcattaagagataaaacattcttatgaagagctgagtctagcttatagctagaacgtacagaaaacaggattgtgtcttgaaacaagattggagagatcagtatgggccagagaggatgtaaaatggtttgaaaggttcttccccaacttgtgtgtgtgtgtgagagagagagagagaaaggggcgtgggagggggaggtgcagagaggcagagagacagaattagggttacttccagtgttatgaatgacagaccatccctaagagcatagtctgtactgtagcggctccactactgaggagaatgttagcattaaattgaagaggctgctgaagcaatctgagtgaaacaggacagtagcctggctgggttggtgggcaatagttacgtaaaggaggtattacagttttaggtagaaagcatcaaattttacaaaccttttccataagatagagaaaaccagtagtagtgtttcctttaccttcccacttgtgtatatgtgattcatttgatttgatttttggctctgtgatgaagtcaaagaactgggtctgcccttaataagctgctttgggaccatttttaatgacatatttggatctcctgtcgccatgggtgctaatatgccaagagagcagctaatataccagaggagcttcctcataattttgaagtgaggatgtttgtggaatgacattcttcactatggtatttgtggtgtttgatggctatttgtttcttagatttcagggaaagatctacatttaaagctgatttggaatctctagggctgaaatgttctgatgtgtcctgaaaaaaaaaagtgtctttttcttatttatttatttatttgttaatagtttatgtgtgtttttcctttttctttttgcttccttgtatgtctatatgagggtgtcagaagccctggaactggagttacaggagtgaactgctatgtgggtgctgggaattgactcaggtcctctggaagagcagaagccatctctccagtctccttttattttcttatttttttatgttctttcatgtagcttacttttggtagagatggctagactttgatataatttcctttttttccttttgttgattacaagtgtgtaacaaagttcccctggcctggaattcattgtagttccagctggccttaaccctgcaacattcctcctgcctctgtttcccaagtgctggaattgtaggtgtatgccacactgagtggcaaaagctttctgtcttttctttgatcttgcattgtggttatgatgaagtaagttctgggtttgttcagtgaaggaattttatatactcaaccttctttatctgcctttttataggagtaaacattatttgtagttactggtttggaggtctattgtgataattagctttccattaccgtagcaaaatgcctagaataattaacttagttatattttggcttacacatggggtggggaaagtgaaggaggactgactctaaaagtgtcctttctaccagcagtcctcttactgctctccagaggacatgggctggattcccagcccccagagggcagcttgcaactggctgtaactcgggtctcagaggatctgatatcttattagatatcatcttagatgagcctaaacatggttcggagtgtggttgcaaagttaaaatgaaactagtctacaactgcagaggcttgtgtcttctggtagaaagcattctgtgggtgtgtgcatgctatgtcagtgcctgtctgtctgtccagctgcagggggtttgtatcttctttcagtccttgttgagctgtattgatattcaaacacatatgagatggctggtgtttaaagcatggtttataaacattaaagtctgttaatttcttccatggttatgatttcatctccaaaaaatagcagaaaaaatatgattccattaagctcaaagtctaacattaggaaataggttcttctttcatttactgtctgtataacccatgtgcttagtttgagtctgaaaattttagttcatttgtgcataggtcttgtcatatgatggaaggtaaaattctgtgagtatgagtttctatacagtctgagtgtcggagaggaatgctaggctggagttttttctatctaaaactgaatacataatcctctgtttaaagcagcttcaagtatagcctttttgtttttagttgatagtagacctagtgttatttaaactaacaaaattttgaaagatttttgtttgaatgtgtgtatatgagtgtctccatgaatgtgtgtgtgttgcagaggtgagaagaggtggtaaactctctggagtggcagttactagctctcagaggttagaagaggttggtggactctctggagtagcagttactggccacaggtgtaggcacttgtcctagtttgtctctgttgctgggtaaaaaccatgaccagagcatcttgtagggaaaagatttttttgttttgcaggttacagtctgtcttctaggggagctgaggcaggaaccttaaggcagaaactggagcagagaccatggaggaatgctgtttactgacttgctcccatgacttgttcagcctgctttcttatataccccaggaccatctgcctaggcatgtcaccacccacatcacccacagggagctgggacctcctacattactcattagtgaagaagatgcccacaggtttgccttcaggccagtttgatggaagcaatttctcaattgaggtttcttcttcccagatgacactagcttgtgtcaaatttacagaaaactagccaatacagtgtctcatagagcagaaaatttgacacattttagaaggctttcagcatccagtgtgtcaagcaacccattagttctctttgaaacctaacaaggtttgtttcttttgcctaagacttactacctttttcttttacactctgctttttccctttacagtaaagcctcactggcacatgtgccatgaaaatgcttgtgaaatgtaattcagctgtgtctttctgtatcagcttcctggagccacctctcccagagttctttgagtagcctgcagcactctccctgacctggcttacctaccgtgtgaacatgtctctgacttctttcttatttctgcttacctactccattctcattgtactggcttctcttccatttctgaattattctaggcatatttctgacctaggtcctttgtactgactagctcttttttttttatgaatacttgcttccaacatccagaagctaggtccgtatcttcagatctgtcaaggagaagcttatcctcctacttaaaatcacagctccctccttagcatgtacagcatctttctttttccataattgtattcgtcagagcatgagttagccagacatgtaagagcacaaactcttatttatttgcaattaagatttactatgaagctgtggctggccttaaacatcaagtcctcttcacctttcttaatcctgatgtacagcagacatgcacctttacatcttagtctagaatataaacttcagagaaactttttgtaaaaagagagatctcagtaaacctttttataagaataaataaatacattccttttttaaaaaaattatttatttatgtatgtgagtacactgtagctgatggttgtgagccttcatgtggttgttgagaattgaatttttaggacctccactcgctctggtcaactccgctcgcttagtccctggttgctctgacccaaagattcatttattattatacataagtacactgtagctgacttcagacacaccagaagagggcgtcagatctcattatggatggtagtgagccaccatgtggttgctgggatttgaactcaggaccttcggaagagtagtcagtgctcttacctactgagccatcttgccagcccaataaataaattcttaaaacatttactgttgtatagaaactgtcctatgtgtaaagtgaagcccaaattttgcagggtttgttttttgttttttaatttgaggagttgggtatggtgaggcacccctttaatttcagcacttgggaggcagaggcaggaggatccccgtgagttcaaagcctgcctggtcaacatagcaaactcctagacaaccaagcctatccagagagactctcaaaaaaacaaaacatactggggaaagttgggctcatgagatggctcagtgtataaacatgattgttacccaagcctagcaacctgagtttgatccctagaacccacgtaaaggtgaaaggagagacccagttccaccaacgtgtcccttgacctccgtatgaactctgcagcatggatgtgtccaagaatgcacactatcttagattgggtttttgttgttctgctgaagcaccatgagcaaagcaatctagggaggacagggtttattcagcttacactttcatatcattgtgacatccacatcatcattgacagacatcggggcaggaactcagcagctcctgaacctagaggcaggaactgatgatgcagaggccatggaggggtgctgctaaatgcttgctcatcatgttttcctcagcctgctttcctatagaacccagggtcaccactcacagcaggttggccttctcccatcattcattcactaagaaaatgccctacagccagatgttagggaggtgttttctcaattgagattccctccttttacctaactctaacttgtgtccagccagcacgaacagcataccaaaagtacacacacaacacagataaagtttaagaatgagagtgaggggttgagacgggaggcttactagttctgtgccacactggcctatatagtaaggccatgcgtccaaaataaataagtaagtaagtaagtaagtaaataaagtagagctggcactgggatggagcctgagagagagagagagagagagagagagagagagagttgagagagagagagagagagagagagataaagagagtgagagagcgcaattgccaggctctgggtgtgagccctagcaactgtaaaacccagaaacttaggaggacggcacagcatttaccctttggtctgctgtcttatcggagacaaatacaactgaagggaagatttgcttttctgataatatattgaattgatacttaaaccaggattagaattcaagcattccctctgcattgcattgctcttccagctgcaccacattagctttctgtacttgccaattcttgttttatctaattggattgctggctgcaagctgccatttcagttgaaagcctgctgttactgcttagatttcttgaaatcaacatgttttccataccttgttttctacattctacctcatgaccttggttggttaaaaagttggaaattttgaggtgcataagagatgcagggggaggaagggctcatcagttaagaggatgtgttgctctaatgaaagacctgggttcaattcccaacacccacatggtggctcacaactatccctagctccaggtccaggtgacctgacaccctcttcagaacccctcgggcactctgtacatacggtgtgcagacatacatgcaggcaaaacactcagaaacataaaataagtaaatcttataaaaaacacaaaccacaaaaccactgagagatggctcagtggttaagagcactaactgctctttccaaggacccaggttcaattcccagcactcacatggcagctcacaacataggagctctgcaactcctgtttcagggggtctgacaccctcacacatgcatacagtcaaaacaccaatgtacatagagtaaaaataaataaataaatttctaaaacagaacaatggagaaatatggaagctagatatagatgggacctcagcacctaggagcgtgctgggattcaggctgcaagagaagcagagactggacaagacagtgttaggaactgtctggtcttgggctagcagaggtcaccaaccccaggttcaagaagaaagaccctctgtctaaagactagggagtggtgaaggagcatagctgaccccctgtttcagcctccgagtgtgtgtnnnnnnnnnnnnnnnnnnnnnnnnnnnnnnnnnnnnnnnnnnnnnnnnnnnnnnnnnnnnnnnnnnnnnnnnnnnnnnnnnnncagagacacagagacagatacacataaaaaccccaaaccaagatgacaaaagtgctttaaaatgccctcttttgtttttggttggtgttttattgttgttgttgttgttgaagacggattctcgtgtagcttctgctgaccttgaattcctgaccttcctgctgccattttggagttctgccattatggatgtgtgcccccacacttagttttgtagtttctgtagtgctcgggattgaatccagggtttaatgtatgctaggcagcgctttgagtgttactgaccaagctacattcctagccctgaggtatactctaaagccagtagagttgtctctaaatattggcatgtcgcttatgcatacatttcctttttgtcttaaaaacaaaactcatttttcttcatattttaactctttttataattataaagaaaagcataaagactacttataaattgggaagttgtatttcccaatgaagtaaaaaataaaacttgggatcatgaagatacaaaaaagggcaaaatggctcctgttttttgtgtaattgttcctaggtttttcttttttctttctattttttgatgtgcatgtatgagcagtgtgttatatgtacttttaaaatgtgtacaagtatgcatttcggtgtatgtgtgcatccatgtgtgttatatgatcttttaatggtgtgtgtgtgtgtgtgttaacatgggttgtcttttcctatatcgctgtcactctacctttatttcctgagatgtaaactcacaggacctgaagctcatacgcttcctcctgtctctctccctcagtgctaggtttgtgggtgctgggcctggctttttaatgtgtatcctggcgatccaaatacaggctctggctaatcttcacagtctatccttagtcttaaatactaatagattttattagagaagtcattgaaaacatggaaataagaaatgtcatccatactctctgttgtttaggattaactatgggatggatttgattttgttttcatatgtaaataattacattaaaatttaggcaatagtattttagttctttgcatttttcattaagggttaatattgggagcattcaccattatcattatgggatcttacaaatctgaatagtgagactctatcagattataaagagcagaagtactcaagggggcttaagagtcaggactctaccatcgtacagctgcacctcagtggctctgatttttttctctgctccctggtctaatgcgtctcatggagatctgcctcccagcgtctgctcgtgcagtgggaactgctgactgactacttctccttcactggacagttgtgcttcctactgtctgctcttcatttttgactttcaggctttgcaattttactgtatcttgacttgaatttaaaccccccccttttttttttaatatttcagcccttacaataccatctatttattaataccttatattcatacatgtcaagagaaaaaccacaaaacctgtgtctgagttgagcaggcttgctgggccctgccagctgctgtgttgctagccagtcctatgattaggtgtgtgctcactatccagagtagagacatcctagttagttgttcaggtaatgggttactgggctttcttgtctagtgtatgtgcttttagctataattgtctagtgtttgtgcttttagctataatacattattacatatgttataattaatatcattgtaaaatgtttctattttaaaattttcatttttaaaaatagcactacaactcagaagcaagggaaataaacattgaacaaatgtttttggttcagattgaaataaattgaagcgagtgggtactagtcatttggtatttaaaagacaaaatgcagtaggaattcaaaacagtgaaagctagaaaatttgctatttgattaatatattatgctttgatactgtggtagctcatgaaataaaccgtcttttttacttacatactgttggttatttaacattgtgcttcatgcttcatcattctataaaagttttggttctactgggaaactctttctatgctaattttgtaagttgctcattgtgattatcttaatgagcaacttacaaaaggtatcttagaccttcactctgtctccgacactctctgagggatccatgttctgttcacaccacctttaagttagatagtttaagcatctgtgatgttggcacagtgacatataataacatattttttcctttttgaaaacagatttggactgagcaacaaatttgaatcagaattcccttcttcattaactggaaaagtgagtgtctctcttattgttattaatctactgtttctatatctcaaattattttctcatagaaatgagtaaatgtgtgctgagacccatttattgtcactcagcatctcagtgttacgtttcttcccttcctgtaggtagctcctgaagaatttaaagccagcatcaacagagttaacagctgtctcaggaagaatcttcctgttaatgtgcggtggttgctttgtggctgcctgtgctgctgctgcacgttagggtgcagtatgtggccagttatttgcctcagtaaaagagtaagttgaattatgtcttttaatttacatttagaagtgtgaaacaagtcttacttttaccttttttttttctgtttaatgaaccacactgttctgaatgctatatagaagtaatctgatatagtaaagcaagattaattaaatcatatattcaaatattataaaacagctgtgtaacagtcgtcataatttttatacattaggaaattatagtcaaaaggtgcagccctatgtctgtatgcattaattatggactagaatggtactgtatatttctgtgcccatggacatacttctgaacctctttaaatctgattgatacagctataaaataataatattcacctgtgatttgaatagaattgttgtaaggatacagtaaaatagtatttataaagctcttagctgaacagcttatgagaaattctgtcagcttcaatgctgttttaagtataagagagacagtttaaaggaagaactgtgtactttggctcatggttttagagattttagtcatggactgttacgctggctccattacttctgtgcctgaccatgcaaaaccatcatgatggctgagtagagctgcatgcctcatagtcatcaggcgtcagagagggaaggaggagattggaacaagatgtagcccctgagaacagagtccttcctacccattcctctagatcctatgtctagacatttgaaccactttccaatatgccttcatgttaggaatctatgagtgatttagtctgttgagtaggttgtattccttgtaatccagatcatcttgcagtccacagtctcccaagctctactgtcaactgagctatcgcacagctctcctcttacttttaaatgacattggtgtacgtcagtgtctcctgtgcactcacgttcagtacctgagtctctgtggtctatcctgtcagagttcctggaagtagttacagaggctagtggtcctggttctctgcaagagcagccagtactcccaactcacctctccatcccctaacatacaagcttttggagggagtccttcaaatctaacccataacagaagttgtcaataaggagtgactaatattattactagtactatgagagtacccatggaggagataaaatgcttacaggaaaataatatgggttattttatttttgtactttacagtttctctataatgaatatacactgactctgattaggaaaaatcattggaagacctaattttcattgcttataatgaaaaagttccaagatgttagttatagatatgccaaaatgatacaaatcaaaagttggttgggtggtttttgttttgttttgtttttgaagacattgttttactccttggatttgactggcttgaaactcacttcaggttagtcttgaactaagagatctgcctgcctctgcctcccaaatgctccaggccaccatgcctaacacatcaccattgtttttgttatcttaactattatacttacacgtgtgaagttgatgtaatattcagccatgtatggtaactcaggtatgaaatcctaacactcaggctgagacaggaggattgtgaatttgctacatagtaagttaaggccagcctggaaaaccaaaggaggggggcaggtgtcaaccaatttggcttgaatgtttttctgtggaaacatttaatttttgtgctagataatggcgaggaaatgaaggaaatcacatttaatttgttacttgacttctattatagagttagaggtatattttactgaaaatttttgagctgatttattgctagaaaggaaatgatgctttcataatagagttgtatattattttttataatatttaaaatacttatatttctcataaactattttattatttgtgtgttgaacatgggaggtgcaggtaccgccagaagtgtttaaaggccaggggacaacactgtgcagtcagttctcttctgccgttgagtgggtttcgggtggatctcaggtcattgagcttgtgcagcggaagggttttttttttttttttttttgctggccctactttcttagagatttttttacccccctaattcttgccagattgcctctaggccacaaaaaaactgtctggcagtgtttggattcacagttgtattttctgattttctttaggctctgtctctcactgccttcctcatttcaggccttgctgttgtctgagtggctgtccaggtcatatggttacggtggtgggctttgtttgttggatctggccttgattttcagatctgatcttatctttttccctccctcccnnnnnnnnnnnnnnnnnnnnnnnnnnnnnnnnnnnnnnnnncctccctccctccctccctctctccctctctttctccctttctccctccctctttcctcccttcttttactttttaaatgagtaatacaagagattttaatatgtggatgctatatttaaaaaacaaaagtgaaaccttatagttctctatacatttcctgccttgagtataacttctctgtaccatgtcatgaatgtatggagagtactagaacacctttgtaagatgggagacaagatagcagggatttccaaccctcattgtcatggaccactctgctagtctaataatgctagagcctataaatactattttagtataacatttaattattctaaatactacattaatcaatattttagattacaaaaccccaattatatatcaaacaactaaaataaggaactggaaagtatttgaagatgtgagaaaatgctgttcagtgactgcaatgacaacattctggtaatgtgcaagctgcgagggcttcactaagaactaggaaaggaggatgtcataaaagaagacaaaggccacagtatactccaggcccatccacactggatgtcccatttacctatctgttctcctcataacaagactcagggagaatccaaccaagtgacgacccccttagagcagaagcagccagtcagtcggatctcagatccttggggtttggaggggaaatgatagggttaaaactagtgctagggaaatagaaataagagtgcctacaggtgggatatgagacagccaaagtaaccaaagtagaggaaggacaggcctctatgaactacaactagtctctgcaggttccttttggcttatttggaaccccttcctgaagaatatagtaaggaattattgttctgtcccctagcaagttcaactttgtagtagttacacttttatatgaagtcctagatctaacacatctattgtaaaagaatgaattgtgggtaaggatgatgtctgtgaagcctctacctattccaggacagtgactaccctacagcgtaggcaagagaaggacaaatggtagacccaaactatagatctagctttgagggacttgttcctccatcttggcttactctatgcttactctaagtgtgtactttcctgccagataaaaatagactttgtttgttctaaaacaaagtaaaatgccacaaaacaaccaagaaacctctaaaatgctttaaaacaaatttatcaaattgttctttactaatatatatgaaataaaataacagatccatggtgatctggtctgatggaaagaatctatgatttctacaagtgatcaaagcaccattgctgtttggtcattccagttagtgttcatattgatagctaaagaagatgcatttcaactagagcttaaaaatcaagatgcagggctggagagatggctccgtggttaaggacattgtctgctcttccaaaggtcctgaactcaattcccagcaaccacatggtggctcacaaccatctgtaatgggatctgatgccctcttctggtgtgtctgaagagagtgacagtgtacgcgcatacataaatcaaccaatcagtcaatatcaagatgcagttttattcctgtcggttttgtggactctgacagttctatctaggcactccttattaagagaccttgaaggggtagagatatagtccagtggtaagacacttgcccgagattgcaaggtccattgtttgattcccatcatgacatgcaaagacatacacatatacttacacacctacacacccgcacacacacctacacacttacttggcattagtattttaaaagtgggctaaaatgcggcctggtgtttagcttgtgaacccctcttgtctctgcatgtgtaacccagaatctttttacatggctgggattttctctgactccagtataagtcaggactaaaagtacactttattatgcaactgaaagctcatcatcttcctcactgtaatcactaagtaattaaatggctttgcctttaaaacgtgatgccaggtggtggtgatacacaacttttatcccagcactcaggagaggcagctagatctctgagtttgaggccagcttggcctacatagaatgagaccagctggggccatactgtgagactttgtctcaaatagaacaacaacaatctcctcccatttccccccaaaaaagccctgactccagcttggttcccctctcacctatattttgttccacagagtctgttaacaatctgctattatcagttatttttatgccttccagattgcctttcttttaatactaccttaggttttgagaattattttttataatttaaaaaaagtaaatttccattgtagtgctttataatttttatgaatgcaactttacaaagctactcataatcaaggtacatagcattttttttcccaaaaagccttgcttatactgatggtcactgatctgtctgtcctgcccgtatagttttgtcttttctagagtattgtatcgtgaaattatttagtttatgtagcctttccatcctgactttttttgttttagctcagcacatttgaaatgtatctatttagttttatatattagtggtttgttcctttttcattgtaagaagtttttactatatcttctccagtgtatggctgagtctttcacagtttgtttaaccattgtcagttggaagacattggattgtgtgtggctttagtgattctgagtaagacttgctttattttcatgtgaacataaaagtgagattactgggtcacatagtaattgtgtgctttattttaagagaaacttgtaaaaaagaaaactcttttccaaagtggcaagtacttttgcattcacacaagccttgtgtggagttgcagttgctcagtgtcctggccagggcttggtagtggttagcagtggcagtgttctgatggtctgctgtggtacttcttgtcacctcgctcttgctaagtagtggtagacagtgtgtttatttgctacttgtccatcttcctttttagtattggagggagggctgtgagatatttctcagtggtagagtgccttcctactatgtgcaaggttttcagcctgtagtaccacaaaaacaaaacaaagtaagaaatgaaagagttgaaacaaattgccctctttcccctgtttttaacacagcacctcacaactctggctggcctcagactcagaaagatctacctgcttttgactcaactcccatgccagcatgtgggattaaaggtgatgccagcacacttagccttctcatttatttatttattgtaagagcacggacctacttttatttatctacttgtcattagtttaaacccttgaggatgtagcatcactcagattctcgtccaatgactttagcagaaagcaggaaggttgctttggaatttgacacaagctgtgccactgttgggctctgataatcccaaagtatactgggttttctcagcttgtcaccagaaggattatgttattgtttgctttgaacaaattatatttcttacccaagtagaatttgatttcacataaatactttttattttagaccagctgtgtggcccttttggttttggagaccccatacctacagctagcaaataaatggcctcaaagacttgtagacatatttacctttacaagtccttttctcagcagacctcgtgactccaagatggaaggaaagacatcttgcctgtttaaaactagttatttgttggtatgaggtgctttgtttaagtgatggcacgcttacttagtattcagaatgacctgtctttgaaccccagcactgaagagggcgcagggcaaagaatataaaagaatattttaaagggttcttttattgtttgtttgtctgtgtgtctacctgtgtgcctatgtgaattatgtgtaccacatgcatgtgtgagtctatggaggcaagaagagggtgtcagatcttctggaaccggttacaggtggttgtgagcctcatgtgggcgctgcgaattgaaccccagtcctctgcaaaaataggaagtgctcttaacctgcgagccatctctccaaccttgattctctttaaaatggtgttttctttgttaaattaggatagtgtctcattatgtaacctataacaaggcttgaatttagtattatcctgcctctcagtcttttacgtgttgggagtataaagcatgcaccactgtggcaggctttagactagttaatgtaattctgacgttagagatgtgtcagctctagcagatactagcgtataccctgtctttcctatgtctttggcagagctgacggtttgattttgatgatctagtttatcacttaaaaaattgtgctttaatgccaggctcacaaatcccagtttatattaggctgaggcgtgcatctctgtgagttcagggccagcctggtctacattttgagttctaggccagccagggctttgtagtgaaattttgtttccaaaaagaaaaagaaaagaaaaaaaaaaaataatgcctttactatcatgtctactctttcgcctaaagcaaagtggtgaagattttgatctctcccatattttgtatgacaagaagagacggtcaaagttcatgttttgacatatgactctctcggctttataagtcataatttatgaatctcttactgaatttcattatgttcccttggtgttgatcttaacctcgctgtcacaccgtcttacttactttagcttatttacttgagaattatgttcagtggggcgaatcttgcaaatttgtgtgtcaacacccaccctccttgagttggtgtctcatgtggcccagtctagtcttgagcttacagtgtagcagaagatgacccaaaccctctgatctttttgcctttatttcctttccagttgcaggcatgtgcttattattagggtctgggagccaactctgctctgcaactgagtcagggctgtaccaactgagctacatttctgcctctggaatttttttttccaagattttttttttttttttgatgattagtttttcatgtaaatgttaagttcagcttgttcactgaggttttatgtgtatgagtaaagtttgcctggatggatgtctatgtatcatgtcctgtaaagagaagtctctcctgtcaggcgtggtggcgcacgcctttagccccagcacttgggaggcagaggcaggcaaatttctgagttcgaggccagcctggtctacagagtgagttccaggacagccagggctatacagagaaaccctgtctcgagaaaccaaaaataaataaataaataaaatgagagagagagagagagagagagagagagggagagagagaggtgtctcccatgctctcccctgcaacagaatcaatactcttgatcctgaactttattgatacttttagaatagttcagtgtagacctggagtcctcaatgtaaagacagaaattatatattaaagcctaattgtagaagagaatagcataggccatttttcattgaggaagacgggctttcaggagctggagagatggctcagtggttaagagcagaggacttgaatttggttcccagcacctatgtcaggcagctcatagccacttgtaactccagcttcagggactctgatggcccctttgtggccttcactggcacctacactcagcaaacacacatttgtgtgccacctccccataattaaaaacaaatctttaaaagatttcttacttaaattttttatacaatgtattttgatcatgtttttaccctcccccagctcttctgtcttctccccatctctctacccacccaaatccatgtgttctccctcctcctcctcctcctcttgtatcactggtcaatactcaaactcaacactggacattttgtgcatggtctccaaggagaaactagtagccacaaccaaagacttggaggtttgactgtggtggagtccagaaagagtaggtatgctagaaaagatcatgtttgaataacagaggaagaaataaagcacgctcacacccacagacgcagttctgtctaccagtatgctgttaaaacaggaagacaaaagcgtgcctgaagtcccacccccaaaccttcccccttcctaccctcccctcccctcaccccccctcaccaccaccaccaccaccaccaccaccaccaccaccccacccccgcctttttttcctggtttctacctctgtctttcaggccgtaagtctatacctgggtcctctcccattagctcctacctggagtggtgataccaacctacaaatacttattttatttttgagacaaagttttgctattatgttggttgattttgtgtcaacttgacacaagctagagtcatttgggaagtgggacccaactgagaatatctctataataagatttgtctgttggcaagtctgtgagggcattttctataactctagttctaggggaaccaatgactctggtttcctcaggcacctgcactcatgtgcacatacccagatacagatacacgcatctacacacaattaaaaatcataaagtcatctcaaagagaaagcagagattgagagtgcatatatgttaatgcagcgcgcgagaaacaggagaccaaactgaaggaagtgactgctgcttatttaattctaggtgtgggatctgggcatgtctgctctttccttattaaaaccttattgtgagatttttttttttgaagtcttaaattagtaactctagaaaagtgctctcatataagactgcttgtagctgaacagtatatttactgctgcttcattttaaaggaagtgtctcttatgtaaattaaggtattcatgtggatagtactgatgtttagagataggatttttagtatagagcccaggctggcctaggcctcctgcctcagcctcctcagttctgggatttttagtactcattaccatgccctgtttgattatctgtttttaattaaataaaaatattgcaaatgtttaatagtgttattgggatcttacagcactttactaacgaaccattttcctaactctcagattcaaatgcgtctgtaaggttccagtaacactatgaatgcttaaaactcaacatttgcaattttaacatgtgtctcagcatgatattgttgatgtggtagcttgtagaaagatgtggtctctcttttctgttcagttggctgataaagatttatttattattatatgtaagtacagtgtagctgtcttcagacactccagaaaagggcatcagatcttattatggatggttgtgagccaccatctggttgctgggatttgaacttagaacctctggaaaagcagtcagtgctcttaaccactgagctctccagcccgtccatatgtttttatacatttctattctcttctgaagttctgttttcaatcatttttctcttctgttttcttgactatattaatcatacttttagtttgagttggttatttaaggcagataacctggttagtagcttaggcaacttgcatgtaatagttgacatttctgttaggatagttgcagaagcatattctttacatatagttctgccctctgatggaaaggacacaaggttggtagctctagaatataaccttggtttcaggtcacagcaccactgtactctactgtagctttaagttccttgacctagaggattccatttttgtatgtaaaatgaaagcaatttaagctgcctgatagtcttgttgggagcaaagcaccttgcttggtcagactcctgagtgacaggctgcatacttgttgctttcattcttgcttctccagttgtttattacagtcttattacagcaggagccttctagtttgtccgtctttcctcactaagacaaaacaaaaccttgaactcctttaatggcatttgtatcttaacaaaagttatttgacttacgaagtttttctgattttctactgttacttgaaattaaattttagtttaaaaaaatcttaccaaggaatttttttcaaatattattctcaaatatcaatttccttaaaattttgtgcagcattttatatatgtatgtgttcatgtgtacttttctggaaaaagttcaaaacttttattattcataaataccagtatagccttttaaaaaaataagattcactcgctaacctgatgaaatgtcatgcaactgtgcattactgggctcctttaaagtcaccccgagtgctccagctgggcacatgtctccagttgttggggtctccccatctaactgctctacagcgtgtccactcgttggctaaggctgccttactgtaacactgtggctacactatttgaaagtcagtgttcatatgtagatttttagaggagtttttgcatataggaaagaaatttcctttgaggaatcagttcatatttttgtttatcttggcaaattccaggttttgtatgtgtaattacactgagatacactgtctgattttcagctcaccactggaatgtgggatttaacgttaatccagaacaaacagaagtgaatcgtttaattgtctctttaaatcaaagtagttcactccagattatatacagtttccttctgtaagccccaaaaccattgttgtctcacttatttctgagtttccatttgtacacatgcataagcacaggtccttatttaacaactgcacgggttaaaaataaaatcacaagtgctctagtggtattgttctcgttaaatcttaattgatgagttacaaacttagcagtttggatttcaaaatgttttaaataagatcttgaacatttgaaatttgccttgacattgtttaatataatgaacaaatctagttcaaataaattttaattgcaggtttaagttgttgaacttttgtaaatggttgtaaaaattttaaaaaccatttttttccccaagtagctgattgtgaatgtgtctaactggtcccttgtcctggaatatttagggatgtttagtggcccagagtgtgaaccctgcatggcagtaatacttcattccttaggaaggtagatcacttagggacaataacaaaaaggccttagagcaaatcaaaatttaattttgaggaaatcttaattttctattttagtagttttttgtggtttatgttttactattttagggttactttaaattacttctcagttcttctttagaagttaaaaactgtatgccgtatttactattgttgattaatattcttagccatcttatgaattctgatcttttcgttttctttgtaatttttatgttctgattcttttccacggttgtaccaaaggcaacaaaaataaagccaaatgcttagcttaagtctacactgcctgttcagtaattgaaatattttaaaattttagtcactcttgaatagacaagcaactgtattagaactagctaacattaaggaaaaatataactgtaaagatgttgaaatgaaaaatatgttaatattattgtttaaaattgtcattcaaaatggctctgatgaggcaggttgatggggtctagctgcttggagctggcattctcaatcgggttccctgcatgagagcatctcacaaagacttgttttgcttacatggtgtaagctggtggtcttggcccttttaactcaagactccatgtgataaaagtaggtttcttgttggcagcctaggcaaaaaggactggagattcatggtaaagaactactaaccttgtctttccaccccagggtgagtactgaaaaggattaaggccactgtagggaacttgtactgaagcctgccttcactgccctttctcctgttctttcagctaaacagaagagttttagttcccatggctatcaatctgctgtttttctcaagcactacattcttttaagaaagctaatatgacttatttttagaaggtagcctagaaggataatgttttgttggtatttcatttttcatgatttgtatatttttttctgatccatattaacttaaaatattttgagtttgccaagtagtataatcacttaaaactcaattgacaaagtatttatatgatgaggtttctggtctagtaaatagataacaggtttgactgtgttgaattttttatttcattagaatagctatctgacaaccttgtggacataaactcttaactcttatttctagatgactgtaattaaaatgtgctttcttctcactgaagtttaaaagctttgaaatagctttcataatgctgagatgtcatattttccccactatctgccaaattagtattgtatttcatcttgaaaatatattttgatttttgtgaactaaaaataattgcatagtataaaacattctctatggttaaaccttttttcttccatttaatttgatcttttgttgttactaacaaataatttgtggcagtttcttttttactttttaaaaaattattactagaatcactctgctttgtcaccttagtgtgttagaaatgttgtactcagatcaagggtcctttctggctttgtgtgttctcacctgctcctcactgtaagtcactgccatgtcaagtgcagtgatggattgagctgcacgtgcagcggcctttgtcacctgtcaggcaagcaggagagaactcttagagaaagaagcgctaattcacagctttgattcactccaacagtatagaaatactgaatatttagatgattatacagaataggacatagcaaatttttgctttaaaattggtaatattgttggttacaattatttaagcccaaccctatcattaaactcctaattagagtcaaagaataaattcaaagttcctacataaatattttagaatttcagatttatacttcataattatcttttatacagatattggtacagtagttgatataagtaaaagctcatattttaaattggtaaatgccatgtgtatgtgtgtatgtaagtatgatgataggatggcctcactgtatagcatctcttaaatttctgatgacttgatagtatggttaaaaaaaaaacactttgagtaataaatatttgcagaatatagttaagtttttaggaactattttttatgtaattttaatattaaataacagacttctaaagctacttcttcctaccctatttctttaacttagcccacccccttttaaaccatcagtaaattgtatagtaatcttaatctattattaaaagattctcgaaaggaagattacaaggtggattcaggttttgaaatggttttaccattggtttagcagcgggtgggcaggcagatgcctgctcataggagaacctattgccatttttcaccattgatagagtagcctttcagagtcaatgagctctgtcaatgtgagcttgtcaaggctacaacttcatagacctgagaggcggtttgagaggtcagcccttttcaggttcgctgtgatgcaaatgaactttaatgcttaaacaactattggaatttttatgtctgctccttgttcttttttcttcacaaagtcattgacgagacattcagtgctttttaaattggaagttgcattgtgctaaagacctagtacagatttacggagggctgaaagcagttagatcatgttcttttcatggtgcgattagaatcaaatcgatttccctacagccttcagcattcagatggcaattttaacaaagcttgggggctagacaagggacaaaacgactgaactgaatgttaattacactctgcagccttattttcttttgatttggggctgactggcaactaaattaacaaaaagtgtgaccataactgctgccctattttcatttaaaaggagagctgcctctaaaaggctatcttacaaagaagcaagtgagagctgctgatcagcgctaacaagggcactttctcttcaacattcttgccagaaagactgttcaaaactgtaataaattagtcattgacatattattgtcagaaagtagttgattttcttatttttgtgacataaaattggaaaatataagcactcgtggtaatttgttgatagctatgaattataattggcatctatgtgacttcagtgtctatagctgttgagcatgctgaagtgaatgtaatgctgtaactggactcagtagagactttaaataaatcctaatgtttttattaagtcttcaaaaccagctgttcctaccagtttttcacctcactcattcttgcttggcatgcaagtttttatgtgattatcagtacttatttagttacctatttacttatttacaaacatataatatatattattatttacttattcacattcaaaatcagtggccatctcttcaagccaaagctgcatcatggctcagttgatcacgtggcagtgctttctcttccacacctgcagtgttagtctcaccctggctctacgtgttagctctgtagtcacacttccaagcaagaagcatccatgctgtgcagtctccatttcagcagcctagggaagtcagctgctcagctgacgcctggaacagtactgttggattaccaagtggattgtagtctcagatactactttcatggtgctttaaataaaagtctggctctgtttggaaactgcactatccaacatactggttttctcatatagtcctaaaatttgtttggttttgtaactcctttcctcctttattaaccttcaattattatgtttttagacttaccctaaaagccatatgttttttgttagctaatatttaaattattatagttttaaagtagagattaaggaatgctcattactatttaaatactgcaaaatgttcctaaagaagtaggggtttaagtttaaatttggcaaatgatatttgcttttaaggctaatagtttttttttttttaatcagaagctagtaagtgcaaaatattttaaaaatatatgatatatatttaaaagaaaattcacatttgtttacaaactactgtttgtgatgaggttgcttcttagtgctagagcgtggggaatacagaccactcttgccctgtcgtgggtttatacttcttcccttttcacagaaaagcagctgcaaaacagcttttctaaaaccagtcaagagtaaactctcccctcatttgtcttccagacacgaagatcgattgagaagttattagaatgggaaaacaataggttataccacaaggtgagtcctgcggggagcaacttcttactgttgggtctgaattgcacagtatggaaacagatgcttttgttggactgaaaatatgaaaggtggacgaatgggcgagtcttgtgcccaggaaaatggagctcatttctcttcttttgccatcctcatgtctagctgtgcttgcactggagactgagcaaaaggaaatgtgaaacgaacaacatgatggaatatgtaagttaagggctgtttgtgagcttctctattaaatgatcatttattttctttctgatcttattctttccatgattattaatcagcaaaggtgtcaggaacttaatctccctagtgcaaggattttctacggtccacagatgcctgggtttcatgtgcaagactgatttataaagttatgaatgacttgaaaacaaggcttcactgtgttctgaaaaataataaattaattgccaagataaaatggcctgaacatgtgttgatggagtgtgaaattttagatgctgtataaagaataaccacaaccttggttacgcagcacgtcagatatggcgttttatataatgctaatgagtttccaagtatggaagagaaccttccagccaagccgctggagcctgagacgcctttacagactgactgtctgtgttcctcatggctgtagtgggttttccaaagtgttactagaacactgctttgtacagttaccttaaatgtaaacagatgttggccaacccgtcttgtcctctaaaagatggctaatttgcctacacttacatatgtgtatatacacacaattattttagaaatttaatgtattggtactctgacttatttgaataattgttcttattttgaaacagaaaacttcacaaaattatgaatttattaattctcccttgagcttagtgttttactttaaacatgtagaggctattagattaaagagaaagatttaagaaaggagttagttgttgaaactgaaactagtctttgtgaaagatgcgccgttatatttttgagaaattttctctgttctttgaaaataactgtcattgtgtgtgtgtgtgtgtgtgtctgtgtgtgtgtgtgtgtctgtgtgtgtaaaagattaatttttaaaatgtttaaatagttggacataatcataaagccattttctggttctttcattatcaaatagccaaatctttctcttcttgaacatcagagatattttatgtgttctttctgcaacctccaaactatttgttcacaaactaagtaattttgggtttacttttatgacatcacattaattttgaggttgagaaagacacatgctgcttttttataaccataaaaagggaacagctgaaagactcctgtgagcttgacctggcaggcgctatcatttcatcattgatggtcagaggtctattacctattgagagaacagcaatagccatttggggcatttcaagggtttcatgaaataataataataataattagctattaagcatttataaaccaaaacaccaaacttaaacatgaagctttagttactctttgatgtttctaaatatactttggaaaggaaaaaaaagccaatcccaaactgaatatagcacaatgatagagcatgtgcctaccacacaaggggttggatctcttgcattgggaaaaggaaaatctaaattctgtgatttccaagtggagctgtatgaaaaatattcattcatatagtatatacactgaactttcttttatctttaaaaaattctctcattacaattaaattagtagctctttaaaacattctgaactgtatacgtcatgaaaaaattttaatttaccttgaatttttatataattaagcacttttaaatgaattgtatgtcacataatcatagaaggtatacaaaaagtaattttttctttctcctttattttcccccgagacaatgtctctctgtgtagcactggctacctgggaacttgctctgtagaccaggctggcctcaaactcgcagagattctcttgcctctgcttcccaaatactgggattaaaggtgtgcaccatcatgcctggcttaaaattgattttaaagtgatttttaaaaagatattagaatatctgtatttgtggtacttaaaaataggaataaacaaagcttgaaaagctctttaaagcatttaaacattatactcacacatagtctagtaaggaaaaaaatgcctctttagtgagttaatttgaacttttctattgtgcatatacttttgcctatagctttacacaacttttttgttaaagttctcccccttgattatattttgattgttagaaataattacaaaaataccaatgaaaactattatttttgttgttgttacttgggtatgaagtacttgtggggtttgtgaacaaaatcattttcagaagactgttctttaaaaactaaggcaaactcggactcaaaaatagccacgttggactggagagtcggctcctcagtcagagcacttgttacatttacagaggacccaggtcagtcagcagcagctccgtggcactgcatagctgtctataacgtaagcccagactatctgacattcttttctaatctcttaaggcaccaggcatacacatgtgttttgtttgttttggtgtgtgtgtgtgtgtgtgtgtgtgtgtgtgtgtgtgtgtgtgtgtgtgtgtgtgtatccatgaagaaaaatgcccataaaataataaaaaataactactgttttacgtttttaaaattatactgtaaaatggtatgctcacccctgaagcctgaaatttaaaaaccctacagtagaagatgtgtttgattacctaagtactaattcagtatgaacttgcaagtcatttaagtattgaatcgttaacttttagagctacaaagaacctttccatctggtccagtctatttatgggtgaagatcatgagaaacagggaaaaggagcacaaagaagaagcagcagggtggagaaaaaggactttctggaaagatgcatttctattttatcagtgtttgggctgcaagtgtgtctatgtaccagattcatgcctggtgccgttgaaggccagaagagggcgttggatatgctgggactggagttagtgttttgagctaacatgtgggtgctgggaacctaacccaggtcctctataagagcaaccaatgctcttaactactaagctgtctttccagccctgagaaccgatgttaacatcggttttccttatactcggacaatttcaaacatgcatacagtgtatttgtccccctttcccctcagtttctctttcttcttccactcccaactcctcaggaacctttctccccagcacagcttcctcctgttcactgttacttatcatttcattgttttaaaaaataacctgctgggtttaatcaggcttgctggcctgtgcattagtaaaggattatttactggatcttgggcaacttcccagtgcctatgtgactctgagtctcccagcagctatgtatgaattgccaataactcctcagtaaggggtgagtgaggctgtgtgatcccttttccacattcgccctggagtcttgacctgtaaaatgtagtgcagggaaccacagctggtgcgggttcaagcatgcagtgagcatggtgtccagaagacaggggtcttcctctcttctcccctctccttagtgttatcggagcctttgttgtgggtagagggatagagatactctgcttctcgggcaggccagcactcagctcaggcaggtgagcgagcactcagcaggcttagtctcagtgagaaccattgtcccaggcgctaaggaatagcctcacctcaggcttcctgtagggtaactagagaaagagaagtgttttcaacctggaatggaagtgttctttcctgaggcaaatcaacccaagaggttaactgagcacatgatcagatcctcccttgtcaggacaaaggttgtgagaaaaatgagcttccaactttagaaattattgacatcaaataaaattttaacaataaaaatgtcttatctatttgtgaaagggatttgggggttggggggtgagactgtgtatccctgactgtcctggaactggttatgcagacatgcctgcctctgcctctctgcctccagaatcatacgaggttctaggctatcagataaatgtatgttttaataatgacaagatcagggtggacgctcgggcacatgtctttaatcctagcactggagaagcaaacaacttgatctacatagaggctacaggccagccagggtcacatagtaacctgtcattaaaaaagataaaattaaagttttgaaatgtgcatggattccaaaagaagcctgttttgttagcatgcatctgttatgtctgagctccatcatgacgtttctgaagtgtatggtgtgtctggtctgtgtgcattcttccctcaccctcttgtccctgctctgtcccacttgccctcccgtcttgcttttcccaggagctccttgtagtcgtaggtctttttttaggtctggtttggtttggtctggtttaagactatgactgatgtgctcgccgctcccagtgggtacggctgtgccactgatgttgtttaaagtttaaaaaaaatctgttttaagttgtttaaaacttttttcttctccttttacaggtcatcctcatagaatttttaccaaagacaccgatttttcgaccagattagcatttgctttatttatagagactttccaagtgtgttgtctttccaatggtgccttgcttggtgctctcctgctggtgacatgatgctggttctacagaattgggtggtgttcttgtttgttttgttttttaaataaccgcatgttctatgtgtgcatatttgtcaaactttgcaagttatttcatacagatgtttaatacttaagttattgtgctcttttctgttatatattctgattttcaagggttactttttgtattctcaaaaaaaatacattcgaacttagcataaaaatgggcagcctttgttattttgtcaacaaggttcacacacacagtcctttacttgttggtcccttaccctaggaaacatagtatctgttacaacatgctcatgcactgttgtgggcttccctttagaattggccacaacagttgtttggaaactgtaaattttctcacatggtcttttgggccctgagctgaccttcccaggaacctcacagttccggatcctttgtctcagtagatacagcttagcctcatgaagaactagcagccgttttgaaaatacctgtcttcaaaagtggtaatttctttagcgtagacacatcacaaatggtgtgcgtgttcctacggttactagagttcaggctcagcatagcgtggcttcaggctcctgagttccagtggacagggcagtgaggaagctgtgctccagctagtgtctacttacctacagaagtagagcattgttcttaaagttaaaggtaaaacgtgcccgatctaacataattgtagaatggatgtgtttctgaatagtttggaaagaaaaagttctagaattaaaaatcatctgatatttgataccccactggtatatagttatgtagagcaggtagttactaagaaatagaggggacatttaatactattttcagtcttcccattcactttcatctagttacatacttaattttattgaaaattggatatttaagttcagatcaggttagcttattgcttttaaatatacacatacatgtatttttttctgcttggttgtacatatctccacactatagatttctgaatgacctatgtgtagactttgggttttataagcctaaaattatacacattttaatgtgtgtcaagaacttgttccataccattgtggtctagagcaataatatgaataacgtttgaaattatataaactatgcttaataatttgtaaaaagaattgatacttccccttgtattaaaccttttaaataccaattttgttaatttatatacctatatttttaaaaagtgctgctttgtacttctctgaagtactgtgcatatacacacacccaaacacacacacactttaatagctaaatgccaggatctcatatcctatatgggactttaggaattgtctttaaaactttgacttaaggaagtccccgtctgtgcccacccccagctccttcccccaccacaggaacttaacagcttgaatccatagaaaacttttctgtgaagcactaagtgtgcaaaggattttaatggtttcacatctttatttaatgtttgtctatccagggtaggtgtgtcctaccaccataattagtatagttcaaagtaatgcggttccaaaatgcagtgtttcagtgtgaagtgattgtatattgacacagagctgaattagcctcaggcttcagaaagagcagaagtccacgatgaccacacagtctatgcaagtgttccctgtgtacagctgtcaatctgtagagtgacacagctgtgggcttgacaggaggctgacctagtgcagaggtcgtttcccctttactgttggccagttgtagtttcaaaattatattgtaagaatattttcacaattaatattaagtataggattttaaaagcttttataactgtaattaaaaatgtcttcagtgctgaaaaaaattccttagaaatgtgcactcccatacttcatacacacacagagaaactagggtgcacatgtgtgcgttaccacacaccagtcgtgatccggacatttagagtttcaggtcatagctcacagtgttaccatgtgctgggaattatatgtctaaggcaaactggttacagtgaaccttgttatatgaccaaggaaacattgggagtgttccttagctcctgttctctggctttagtaagtcatgaaccataggtagtagttagactggccaaaaataaaataaaataaaataaaataaaataaaataaaataaaataaaataaaataaaatggattgctggccagaaatcccaatgtttatttataagctaataaatgacctgtgatttttttttttttttttttggtatatcactggctttttacaggtagtcactattactgtatataaactctttttttctgacgatgtattttacaaactattttgcacacaactgtggatatttggattaaaatagttattccagagtccagtagcagtggtaaagctgatgtgacatttttagctttgaggtgactttgcccttcccttgtgaaggggttcactgtatctatccaaattaacagcagatactagaccaacactctttaataactagattgcagtcatctagaatataaaccatggaacttttgtcttaaaatccacaaaataaatttaacagaaccttgaataatggtaaacaataatttgcattaattattagactagttttctaagtgaacaattcagtgagttggaactacagctgccccccctatggtcgttatggagtatatctgattgtttctttgtacacacaggctagccacataggttttggagctcccactgcagtcacgtgtaagatgctcagtggggacataggcaggaggacttgtgtctgcgagagtccagttatactgggtttatatgtggctctgtacataatcggaccctttgactttccatggtatttgacttcacagtttaccctgtgaagtttagctgcatgcctgatattccactgtacagatttgcttttgattgacactacaccagcatccagtcgtggcccttctgtccccgtaaaacttgtggtgctgggtatgttcctaaggcctggctggtgatccgtaacgctctggtactgagctctattctcaagcactgctgccctcttggggatctagaatttccacctagacctgggaatagttgagaatagctttttattttcattcttgaaaatgttaattccattttactcttgttctgttctcagcatctttctgtgtaacccgagctagccttcacctctcagtcccctttcctagcctaccaggtactgagatcacaggtttgtgccaggctgatatttccgtgatcctgatagcactgaaaacagacttcaagatgctgatgctgtgtttgtgttgcgttctgttttgaaacaggctccatgtagtccagggtggcctgaaaccttttatgcagctgaggattataggcgttagccatgaccatgccagcaagatgcccatcttgattgcaggacatttcggatggtctacaaggtcatcaaattatttggcctctttattttcacttcctttgccagaacaggatggtgctatgactacctcatgatgttatctttgttcagctgttgcttattttttctttttattaagttttatgtgtgagtacttacctagacgtctagttcagtggtaatggtttggccatacttaacagtgacagcatactgttgttaaattgtgtttttaaaattagaggtgcggtactccccgtgtgtacttaaaatgctttgtgtgtttaaagattgggaaagtctccgctataatattgaaagaaaattatatgtgatcttttagaatgtaggcatctgagatacacagactatgttctccctttgcattttcaaacacaatgctcttcatttgagagttaactgttttttctgtttttgtaaaataatataaggtcttcttagctttgtatctcaagtattttaatgaactgaacactaagtatttagtttttggtgaattatctaacttctgctctgttactgttgtgtaaagaaacagtatcaaccaatctccaacagaagattccctcccccagggcctggtgcaggcctgggagaccagcactctggaggctatggctagttgctgtatttgaggctagacagtctcacacagcagcaagacagaacagagcaggggttgcttcttcttggttctcagtttagtaaaacgtgtccagttttttctcttgatgtaacagacttaaaagtctagaaggaaaaactagatatggtggtgagctaatgccatagctcagcaggaagaagaagggaattctctgatttggaagccggccaggtctacataatgagcattgtctaggccagctaaagctccagagtgagaacctgtcttaggttcttattacccctacaaaaaaaatctacaagacactacattgataggaccattccctccatttaagactcgatttaactaggtaataacattgctatgaatggagtcttcataaaaggaacttgccttctctcatgatatcaaaccctttaacttctgtttctttttatctgctaaagctcttagtgttgaggctccacagaagagttaaccactgtcaggtgtgatgacattgagtagtctgacttaggcaggaggataaagagttcctgcccaccctggtccacactgtgggatccatctcaaacacaaaacaacagcaaagaactctagtattataaacttactagtagtgacaatagaaataagctaggcagaactagaaggcaagagaggttactgcactggtaccctgggctagctcacaaggagtgccaggagtacacacagccttgtgctttcttttctacagactcacaacaggaattatttgaaattacactgctgcagacagagtttccctccagtgttgatgccctttgagagagtagcaggaggccactgagaacagaatacttctttttattgtttttttgtttgtttggtttttcgagacagggtttttctgtggccctggctgtcctggaactcactttgtagaccaggctggcctcgaactcagaaatccacctgcctctgcctctgcctcccaagtgctgggattaaaggcatgtgccaccacgcctggcaattattggttattttttttaatgtgataactttcagacacaccttctagtatgttgtaggggcatctttctagctgttnnnnnnnnnnnnnnnnnnnnnnnnnnnnnnnnnnnnnnnnnnnnnnnnnnnnnnnnnnnnnnnnnnnnnnnnnnnnnnnnnnnnnnnnnnnnnnnnnnnnnnnnnnnnnnnnnnnnnnnnnnnnnnnnnnnnnnnnnnnnnnnnnnnnnnnnnnnnnnnnnnnnnnnnnnnnnnnnnnnnnnnnnnnnnnnnnnnnnnnnnnnnnnnnnnnnnnnnnnnnnnnnnnnnnnnnnnnnnnnnnnnnnnnnnnnnnnnnnnnnnnnnnnnnnnnnnnnnnnnnnnnnnnnnnnnnnnnnnnnnnnnnnnnnnnnnnnnnnnnnnnnnnnnnnnnnnnnnnnnnnnnnnnnnnnnnnnnnnnnnnnnnnnnnnnnnnnnnnnnnnnnnnnnnnnnnnnnnnnnnnnnnnnnnnnnnnnnnnnnnnnnnnnnnnnnnnnnnnnnnnnnnnnnnnnnnnnnnnnnnnnnnnnnnnnnnnnnnnnnnnnnnnnnnnnnnnnnnnnnnnnnnnnnnnnnnnnnnnnnnnnnnnnnnnnnnnnnnnnnnnnnnnnnnnnnnnnnnnnnnnnnnnnnnnnnnnnnnnnnnnnnnnnnnnnnnnnnnnnnnnnnnnnnnnnnnnnnnnnnnnnnnnnnnnnnnnnnnnnnnnnnnnnnnnnnnnnnnnnnnnnnnnnnnnnnnnnnnnnnnnnnnnnnnnnnnnnnnnnnnnnnnnnnnnnnnnnnnnnnnnnnnnnnnnnnnnnnnnnnnnnnnnnnnnnnnnnnnnnnnnnnnnnnnnnnnnnnnnnnnnnnnnnnnnnnnnnnnnnnnnnnnnnnnnnnnnnnnnnnnnnnnnnnnnnnnnnnnnnnnnnnnnnnnnnnnnnnnnnnnnnnnnnnnnnnnnnnnnnnnnnnnnnnnnnnnnnnnnnnnnnnnnnnnnnnnnnnnnnnnnnnnnnnnnnnnnnnnnnnntgaatcatctctattagagggacttggggggcttttttttttctgataccttattttctgaatttctgttctttttactgtttttatccaaacaaaaatgagagcattctcagaattgtattctgcttctttttttctcaaatagagactgcagcaaaatgccatcgctgcccacagtatagttagtattttagactccattgcagaaagcctaagagagcccaacctttgtacctacagccttagatattgttaaatagccattcagttttcttcacattgtgtgtgagatgaatatttcttaagacgttttgtttgctctcccaaagaaatcaaccaaggaaaaaaaaaaaaaaaacctcaaaaaacaaaacaaacaaaaaacaccctgtaactcatgtgaagcatgcagggtgttgtaatttcagtttgcaaagcgctgagatacaatgttgctgagccaaaagcacacgatagatttaatgtagccaattgtggacttttgaaaaaaagagtaactgttccctgtgagttaattttggattttttcaaaatctctcttttaggctttgtgctggattcttccagacaaatgcgtcttccatgtgggccagtgttctgctaaatgctctccgttctccttttgcaatcaagactatgttgctaaggagatttcgcttttattggtgccattgatttgtgttaatacgttttgaatacctcttggtattcttcagtagacaaggccaaaagaaaaacttccccgagtcccccaatttacatgacaaacggagcggtggtgtaatgaagccgatctaaagtgggcagttgaaagggacccaaagaagggcactcaagtgagaaatgaagaaatgcgtgagtgcagtctgtaggctgccttcaggccagctgcaggaactggctccagccagaggcagagtgagggagcacctccctctgcaaagaccacccacttttggagcccaaactgacacaccatagattacctcactgtacaagaccacttaaaagtgagcaaggctcccaagcaggcaagagatgattctcagccccttgagtcccaagcttacagaggcctggcctcctccacgtgccctttgaccttaagttgctaatgaagtcctccatgagtgagttcttgtcctcaggaccgacatactcacatcaccttggaaaaagactctaactgatcacatttggtttactcttatattcctttgtatcccatcccagctaccaaaaccctttcattactacagcactcaggagctccgtgagcaggtgactccaggctgagcctcagtacataaaagcccaaaggactgctgtggggcacatatttacacagacttgttcaaacctgttaacatgccaacacagatcatgtcttagccatacctacgtaacttgaaggttgtttagggatgtagctcagttgatagagtgagtgcctagcaggcactcagacagtcctgagctcaatcatcagcaccacacaaatgatgcttgtaatctcagcacagggcaggtggaggcaggggggccagaagtttagggtactacacagctgtatatccagttaaggccaacctgtgattcataagaccgaagtcaaaagaatggaaacatcatgaaaaaattgctatagccattggtcatgaaatacttagtcacttcaagtattttataattgttaatttagtgaaagaaaagcataaactattggttctttaataacaagtaatctggcaagataattagaggcatcctgtggtcactgggaaatagaaattcctctcttcaccatatctttttcctacatccaagatacttgttggtcactctacctaaaatccaattttctaaattttccaaacaaaatcagacaagttttgtcaatagtcaaaaaatactagccgggccgggcagtggtggcacacacctttaatcccagcactcgggaggcagagacaggcggatttctgagttcgaggtcagcctggtctacaaagtgagttccaggacagccagggctatacagagaaaccctgtctcgaaaaaccaaaataaaaatgaaaataaaaaaatactgtagtttggggttttttttcccccttgtaatatttttacatttagtttgctttctaacatagtagttgtgataatatctgcctggtttgtatagttacagggccattctattacatagagctaagattgaggttggggaatatacctctgcattcttgctcactacatacaaggccttggattcagtcctcagcaccgcataacacaggcacattggtgtacgtgggaagtggaggcaggacgaccagaagttcactgtcacccctggctacacggggttcagagtcaaagctgaagtcaagaattctaaggatgaaatggcaactaaggattataggcgaaattttaaaaagtgaaaatatgtgtgttaaaaacatatactggcattttactttaaaattatactgggagagtatggcccgcaggagacaggcatctccagggtcacacaatgtgcatggcatgggttgttctgcacaacaaatgagacacaaaaaaccccactcatttcacaaagatgtagagtttaacagacatattccaaggtcttttgagctctgctaagccagcttttcagtcttcctgtgtgcaacatactccttgataatttttctgggtagaggctgcacccagggatcaagcctaggcttcatgcttgttttactaagcaggtgctccacccctgagctctataccccaatcctgttgggtgaaaattttctgaactaaactaagagtaagtacaaccactctgccttgattgtgttgcacctgtgtttttctgtttttgtttttctgtctgttagccctgtgccactatagcagatgccctaggaaagagttatttaggctcagggttggtaggctccattgtgtctgtgctgagaaaacacatgttggcagagagtacatggtggagcagagccacttgcttatggctggaaaaaaagaaaccagagccccacaatcctctgtaagtgctgccctcagagcactggacaatctcaactgcttcgaagtctgccacctctcgatcgtaccactctgagaacatgcccgcatgtgagcctttgtgggatgcccaggatacggagcaaggatgaggtagaccatcagaaagcacgaatgatcactctcgtcagaactatcaataattagcaccctgaaattggtccaggaaaagcttatgtggaaaagcattatccttttgcccagttctgtcagcattggctctttagccataaccctcagttttaaaaagtgagggctggagtgatggctcagcaggtaagagcactggcaaaggtcctgagttcaattcccagcaaccacatggtggctcacaaccatctgtaatgggatccagtgccctcttctggtgtgactgaagacagtgacagtaacaatgtcctcacataaactttttcttaagggccagtgagatagttcagtgggtaaaggcacctgccatcaagcctgacaccccacaggtttattcacagaatgcacagcagaaagaggaccaatcctgaaggttggctgtgccagaccagtgcagcatagcatctcctcatttgtcctcatgagacacagaacaaagtttttaatagctggtggtggtagtttatgcccagggcttgggagactgaaggaggaagaaggccacagatagccattgtcatgggcaacatggcaagccaagctgtcacctcagccaaaacaaaggaaagggggaagagaaaaacaacacccaactaggaagcgtttattcttgctactcgtgcttatacaccacctcaggagaacttaaatgacgacgaaggagagcatgtatatttttctcaggtatggtaaatttttctctcccattctgacctagttagacccagaacagtaactcaggccatcagttgttggtgattgtaccagg

SEQ ID NO: 967 - DNA, 1116 bp, Mus musculus
tgcggtagccggctgctcctgctgcgggtggctcgggctgttgctgtggttgccggagttgcggcggcgacggcggcggcgctggcgcgggcggcggcgctggcgggggtggcggccccggcggatgttgacattgtgttgttgttcctgcccacggtaatggcggcggtggcggcggcaacggcggcggccgggaccaggtctcctcagtagccggagcccacactgccgagcgccagctccgcggcctccgcgcccgccgcctcaccagccgttccccgcggccgccccagagccagggccccgggcggggggctcgccggctcgggatggcggatttcgatgaaatctacgaggaggaggaggacgaggagcgggccctggaggagcagctgctcaagtactcgcccgacccggtggtggtccgcggctccggtcacgtcaccgtatttggactgagcaacaaatttgaatcagaattcccttcttcattaactggaaaagtagctcctgaagaatttaaagccagcatcaacagagttaacagctgtctcaggaagaatcttcctgttaatgtgcggtggttgctttgtggctgcctgtgctgctgctgcacgttagggtgcagtatgtggccagttatttgcctcagtaaaagaacacgaagatcgattgagaagttattagaatgggaaaacaataggttataccacaagctgtgcttgcactggagactgagcaaaaggaaatgtgaaacgaacaacatgatggaatatgtcatcctcatagaatttttaccaaagacaccgatttttcgaccagattagcatttgctttatttatagagactttccaagtgtgttgtctttccaatggtgccttgcttggtgctctcctgctggtgacatgatgctggttctacagaattgggtggtgttcttgtttgttttgttttttaaataaccgcatgttctatgtgtgcatatttgtcaaactttgcaagttatttcatacagatgtttaatacttaagttattgtgctcttttctgttatatattctgattttcaagggttactttttgtattctcaaaaaaaatacattcgaacttagcat

SEQ ID NO: 968 - protein, 231 aa, Mus musculus
HCVVVPAHGNGGGGGGNGGGRDQVSSVAGAHTAERQLRGLRARRLTSRSPRPPQSQGPGRGARRLGMADFDEIYEEEEDEERALEEQLLKYSPDPVVVRGSGHVTVFGLSNKFESEFPSSLTGKVAPEEFKASINRVNSCLRKNLPVNVRWLLCGCLCCCCTLGCSMWPVICLSKRTRRSIEKLLEWENNRLYHKLCLHWRLSKRKCETNNMMEYVILIEFLPKTPIFRPD

SEQ ID NO: 969 - DNA, 74828 bp, Homo sapiens
  misc_feature (1)...(74828): n = A,T,C or G
aacaacttctcttttgagttcccagatgaagctgggtacttcctaatctcaattaagtgagaaggccaacatgattataactattaaatccaacttttccctgtaccatgtgcaaagaactacagaaaatcttaacactggtgtgtaagaaggccattgacttcaagtgagagttccaaaggataaagagtagattttctcagcatgcattcaggggccaaaagaaagtgcttgtgcctctcagatcttaaaagtgaaaaccagtgtcttaaaagccatgttttaagtgtctaagttaagtatggcacttaacagagacataacacaacttaattaaaaatatcccttaaattttacacacagacacagaagagaaaaaaacctatgactttttttttttgagatggaatctctcactgtcacccggactggagtgcagtggtgccatctaggctcactgcaacctccgcctcccgggttcaagcgattctcctgcctcagcctcctgagtaactgggactacaggtgtgcaccaccatgcccggctaatttttgaattttttttagtagagacagggtttcaccaagttggccaggatggtctccatctcttgaccttgtgatctgcccatctcagcctcccaaagtgctgggattacagacatgagccactgcgcccggtctaaaacctacgactttaaaaattaatagtttgatctatttttctttgtctttctactgtttcttatgatatccagggtcaggaagaaagggctaagtccctctttcttctagccttgctgtattagtcatctattgctacataaccaattgccccaaaacttggtagcttaaaacaacaataaacatttgtcatttctgacagtttctggaggttaggaattggtgaatggctgggtggtctggggttgcagtcaagatgttagttggggctgcttggctggagctggaggatccaattttagggtggctcactcccatgagtggcagaaagcctcagttcctgttcatgtgagtctctccataggtctgtttgagtgtcctcatgacatggtgagtggcttcctccagaatgagttatttaagggaataagataaaatgtgtcatgtcttttataacttagctttggaagtcatatactgtcactttcacaaatcctattggtcacacaggtcacctctattcagtgtgggagggaactatagaatggcttgcacacaagttgatgagtctctcagggaccatcctgaaggctggctatcacaatagttaagtcacaccatctagtcagagccccaaatgttaagaaggctgttgaccaaaccaaggctgatgggagtgagagactgcctctgcaaagaggcagggactagaaactcccttccaggaggaaatatggttgaagtaaatgggcatgtttagctcacaaacaaaaaagatttgggatgtgaacatctttttttttttttagacggagtctcgctctgtcacccaggctggagtgcagtggcacgatctcggctcactgcaagctcggcctcctgggttcatgccattctcctgtctcagcttcccaagtaggactataggcgcccgccaccatgcctggctgattttttgtagttttagtagacacggggtttcactgtgttagccagggtggtcttgatctcctgactttgtgatccatccgccttggcctcccaaagtgctgggattaccggcatgagccaccacgcccagacgcgcacatcttaacatatttgaaggaccatcatatagaagaagtagacttgttttgtgtgtcctcagagacaagaaccagaactaacagatgaagacgtattgaatgactcttggattccaggcaatagtcaagggcttagattacaagaataactaagtcatagttctagaccttaaagaatctagtcttttatgtggaagaacataatatttttgtatatgctcaatatactatagatatttaatacaattattgtagttgttcagctaaagaaggaagtaccgtgtgatgcagactggtacatggttttgaaggccagtgtgggccagatgacttttgggttcattctggttttatgaacctatgattctagtagtaatctccagattgtcgtgaacttaaaagatggtagtgaagagagctaagtacataaactaagtattttatatttatggtgttgatttaaaagatacttttttttttttttgagatggagtcttgctctgtcgcccaggctggagtgcagtggcgcaatctcggctcactgcaagctccccttccaggttcacgccattctcctgcctcagcctcccgaatagctgggactataggtgctcaccaccacgcgccatgacacccagataatttttgtatttttagtggagatggggtttcaccatgttggccaggatggtctagaactcctgacctcgtgattcgcccgccttggcctcccaaagtgctgggattacagacgtgagccaccgcacccagcctaaattagatactttataggtattattattatttagatttagatattactccaggagaatctaagagaaacaacatggatttcatagatttattataacaacattttagggacaaattttgaaccaaatgtgtacacatggtatgaaatgatctggaaaatatgattttatacatgtagccatccatttagtatttatttttagtagagacagggtttcaccatgctggccaggctggtctcgaactcctgacctcgtgatctgcctgcctcggcctcccaaagtgctgggattacaggcgtgagccattgtgcttgaccccatttaatatttattaagcactaattatatggcaggtactgttgtaggtgttaggaagactgatgtaaggaacccaaatatttctctagtggtgtttaagaccagtgtagcatagtggtaagattatgggatgaggaaagatcctatttgagttcaagttctggctctaccacttcctagttgtgtggccttggccaagttacctaacttccttgtacttcagttttataatgtctaaaacagggatgaaaacggtacctatgttataggaatgtttacaaggcttataaggctaagtgggttgatttgtacaaagtgcttagaatagtgcttggaatactatatgtgttatacaggttgtgtatccctaatctaaaaatccaaaatccaaaatgcttcaaaacctgaaactttttaagtgctgacatgacactcaaaggaaaagctcattggaacatttcaagctttggattttcagattaaggatgcttaatctatatacacatttagctttttctccaagcataattggttctgctctcaggaagctcccagcctagtttagatcatcttccttccctctcctttagtggccacagttgtatggaaggcgaagaggatctctgttgctctctaaaggccttttgcatagttgtattgcacatacatcaatcctaaagcattggagcagaagtgctattttctattacttatactgcgggcaccaaaaactctaaggttggggcacaacctgaacattttaggtcagatgcccactcttggaactggagatatggtcagcttaacctaatcacatgtactgaggatggaggggatatgatttactaaaaatcctgagagtgttgttacagaatgtgtgccatttacagaataacaggctgggaagtggtgcaggcaggctaggctggactactggtctcccacttggggatttaaaaatacacatctggccaggcctggtggctcactcctgtaacctcagcactttgggaggccgagttgggcagatcacctgaggtcaggagttcaagaccagcctggccaacacggtgaaaccccgtctctactaaaaatacaaaaatcagccaggcgtgctggtgcatgcctgtaatcccaactactcaggaggctgaggcaggagaatcgcttgaatccgggaggtggaggttgtagtgagccgagattgtgccattgcactccagcctgggcgacaagagtaaactccgtctcaaaataaataaataaataaatacataaataaataaataaataaataaataataaaaatgcacatctgataatgtcactgcctggcttcacatcctccgctcctttacttttggcatgcatttaagatttcttacaaaggccatcaagtttccaccagcctctttgacctcaactccaatctggctctgccttcctcactatgatccacccacactggctttgttttgtacctcatttgagctgtgctcttttctacttcaaggtctttaaacatgctattcccactgtctggagctttctcctctcttctctctacttccctacctccatacctttgcttagctcatcagcttacatgtcattttcccagagaataaatcctgatttcttggagtgagttaggtgggtttactactcccatggacccctgtgcttctccacagaactgatcacaattctaatagttatttatttttataattatctgtcagtcctccccagtggacttcatgctcacaaaggcagtggctgtgtttggtttactgctaaatccctagttcctggcacagtatgtgacacatgagaagcattcaatgcaaatttgttgaatgaatgaatgagtgaacaaatgagggtttatatgctttctcaagtcagcttgggctgtgtgatatcaggaaatacatatttggtttttgaccctgtttcctggcatacaacacctaaaatgcttagaaactccaaagcaatgtctttctgtattctagtgagttgactgtaggctggcagctcctagttagcttcaggatgagagctgatcaccagaaggggctgaagattaagtcaatggccagcggtgtaatcaatcatgcctacgtaatgaagccccataaaaccctgaaggaacagggttctgagagctgccagacagctgaacacgtggaggattacagggagatgaacaagaactcatccgtgtgctgggaaagcagagcaccccgactccgcggggacagaagctcctgcacccaagacccttccagacctcaccctctgtgtctcttcatctggctgtttatttgtaacccttaaaagatccttcttggctgggtgtggtggctcatgcctataatctcagtactttttggagaccaaggtgggtagattacttgagcccaggagttggagactagcctgggcaacatggtgaaaccccatctctacaaaaaatataaaaattagctggatgtggtggtgcatgcctgcattcccagctactcgggaagctgaagtgggagcattgcttgagcccagggaggttgaggctgcagtgaatggtgattgtacctctgtctcaataaataaataataaataaataactattggactgcagtgaatggtgattgtacctctgtctcaataaataagtgaaatgaaatgaaatgaaatatccttcttaataaactggtaaacctgtttccccgagttctgtgagccgctctaacaaattagttgaacttgacgagggtgttgtgggaaccccaatttatagctggtcagtcagaagttctggagacctggacttgtgactggtgtttgaagtggagggtgcagtcttgcggactgagccctcaacctgtgggatttgatgctatctccaggtagagagtgctggaattgaattaggacatacagctggtgcccactgcagaactgattgcttgcttgttggtggagaaaaccccccaacacatctggtcacagagagtcttctgtgttggttgttgttgttaagcaggagaataggaaaaagcacattgagtgtattttccacacaaataggctgccacacaaaataccatagactgtgtcttagtccctttgggctgctataatcaaatatcataaactatgtgacttataaacaaacatttatttctcatagctttggaaacttggaagttcaagatcaaacggctggtagctttggtttctggtgaggggcttcgtccttgtatatggttgtcttcttgctgtgttctaagatagtggaaggggcaaaccagctctctggggcctcttttatgagggcactaatcccattcatgagggctcagccttcataacctaatcacctcccaaaggccctaatatttcctaataccatcaccttgagggctaggatatcaacatacaaatttggggggatgtaaacattcagtacatcgtagcctgggtggcttaaacaacagaaatttagctcacagttcctgatgatttggttcctggtgagagttctcttcctggcttgcagatgactgtcttcttgctgtgtccccatggcacagagagatcgaaaactatctagtatttcttcttgtaagggcacaaattccatcatgagggccccagcctcttgacctcatctcaacctaattacctccaaaggctccatttccaaataccattacattgagggttagggcttcaacatatgaatttggggggggggacaaaattcagtccatagtacatgcacgatctcatttgatcttccagaaccccatgacatagtttccatttgaagatgaagaaaaggaagcttagaaaggtgaagctgccaatggccactctgctaggtagaaatggaactgggaagttttcaagtctaaggaattaactaagcaatatttgccttaaaaacaagtcttgctgactcctgaggcctgacattatccagtttggttttgagccatttggtctaaaggtaaatatgaaaatatgtgaggcaagaatataaagagaaactccaatgaagaggaggctatggagggatgggcacttagcagggtgcaagtgagtacctggacacagagggagaggatcctggaaaagtggcttatctccaggaagaaattgggggaggagttttacaggaaactggatcttggaaggttggcagggcggaggtggagggttggaattacgatgtcaactctcatcaggaaaatgtttgactcatgttcgctcacccctttggccttcttcctaggtcccacacccttttgctggctctgacaggtttttcagaacaggaaaaagaagaaaacacacacacacacacacacacacagacacacacacacggaaaggaaaaaagaaaaaagaaaagggcattcccctgcctctaccgtatacccaggccgtgggagttacaaagatctctcttgtgaatagatcttagaataagaacatttctcccacatccagccagtgtgaagataagagtgaggttctcacagtcctctgaagcctaattaagtcacagtgttctggaaagagcactagtaacactgtatctcaattcagataacatttattaagctccttttctgaagcaggaactgtggaaggtgctggagttctaaggagctctgtgtggcttcctccgtctttgggaagttgtcagctatgtgatgatttagatactttggggcactagccccttatcttggccactgtttctacataagggtgaattctcagccacagccaggtgtgggctgtgccaggacatactgaccttatttcctcttattctctttcttatcttcccatttgcagctgttcctttaactgagtgcagccactagtctcctggttcctgccaaggaggaaattcagaggctgaggagggaggatcgcttgagctgaggagttcaaggctgcagtgagctatgatggtgccactgcacaccagcctaggtgagagagtgagactctgtcttaaaaaaaaaaaaaaaaaagacattcaggaaagcttggaccaccagtatactcaattagaccattaaatcttaaatcgtcacatggccttgagaaagccacatagcatctctgaaatatagcatatcatagcatctctgaaacatagcatatctgaaaataaatacaccctctttgcttacctcacaggttcttgggggaatattaaatgatatattatgtacgtgctttataagcagtaaaatattacataatgctgtggtaaccctcacagggttgataagctagggagccttaagcatcacctattaccccgtatttattgtgtactgggccttcttctaggcacttcaccgatcttaagcccttgaatctgctgagcatcccaatggggcaggtactgaacagggaagttaagtggcttgtctagggtcacacagtaagtggcagagctgacattcaaggccaggtagtcaggttccagaacacacattgttaaacaccagaccaagctgcctcctgtgtgccccactgacacttcctgtgtcctcctccatgagcccctggcagagatgacaattgcttgccttaacaatagataagctaccagaagtcagggcctgtgcctcattcacacacgtccacagtgcctgccacatagctagagttcagtagatatttgttgaatgaacaaataccctccagggagggatacaataagtctgatacaactactgtatttttccttcattttttcttggctaaccacactcatttccttcagttgtttccaaaaggaggttggcatctctcactgtcctcattgacctcctttgcactttctccacgtcaacagtgacccatctaaagccgactactgtgacatgaacactgcacttgaagagcctgaccagcgctgggctcagtagaactatcctttcttctcccatggtgtatcctcactgtccaggactctcttctcagaagcccactccttcccctgtactgtttatatgcttaatgaaaccaagtacccaaagtgaccgttcaactgttactaggcagctaagtagactccattaaaccttttccttccttcctccccttctttctttctctcccattcttctttcattcttctcgtccttccttctatcctttcttccttcctgcctccttttcttcctctcctctgccctttctttcaggtcttttttgtggtaggaactggtaagaaaaggaaaggaattccctaagattttaaggaaacaacaacaaaaaccaggttatgtttggtgagagagttggggcaagaaactgcatcttctaatatggaatccaggtaatttatcagttttttttcatagcatgactacggtgagatttcttgtaagaaaaaaaaaaaaataccagcatcgctggcctcatatattggattatacttaaggggatcaagggataagatgtttgaatttggagatgtcttgaaaaatcctgtggtgagcacaaatgtttgcagtgtctctgctggactcctcaaattgggaaaaaagagactctggttctcatcatagactcaaaacctgaggaaaagcgagatgcgattattagataaactggcaatgacacgcacaaaaatgtgtctattccagccagggcttttcttttcagttgtttgttttggttagagatgactttggggaactgcatgtcccactggacattccaagctgcgttgtcggagtcgcgggtcgcggcctccagtcagcggagccgccgcccccagggtccgccacccagaagtcggcggaggggggcccgccggcgggagcgcgcgccccggtcgccgtctgcgggtagaagcagaggaaagacggtggcctgggagcgcgcgaggccgcacgtgcgcgcgcccgcccgcccgccagccagtccgctcgcccacgcgcccacgcacgcgcccgcccgcccgttggcccgggaagtctcgcgatgccgtagccggctgctcccgctgcgggtggctcgggctgttgctgtggtttcctgagttgctgctgctgcggcggcggcagcggcgtctgtgcttgtggaggtgtcggcctctgggcggatgttgacattgtgttgttgttattgctgatggtaatggcggcggcggtggcggcgacggtccagaccccatcccctctgtagccggagccgagacagccgacagcgaactccgcggcctcggagccggcggcagcggcgactcccctcagcctccgccgcctcgcccgccggtaccccggcgccaaccccgggagtcaggccctttgggcaggggagctcggaggctcaggatggcggatttcgacgaaatctatgaggaagaggaggacgaggagcgggccctggaggagcagctgctcaagtactcgccggacccggtggtcgtccgcggctccggtcacgtcaccgtgtaaggcccggaggagggcgagggcgggaggtgcgggctggggtgggccccgttactccacgggagccccgtttcccctgtgtccgtctggtgtcgggggccttccgaaagagtaggcaaccaggaagtgagaacttggcttattttcatttgtttgggtctccgaagtggggacggacgctgtccttcctcctccacacacccctttagcaggccctacaggcccgggcgatgtgacgatcccagtaggcacgggttttcattagggtctgccctgcgggccacccttcctcttcagggtggaagtacgtgtattgacagggagcctccttgttttctcgcccagttaccctgtggttgtctgtgcctttgcacccagtgacatggctcagaggccagatctgggccgtgtgagaccccagtgacaattggcagcgaagctccgtttcgtgtctatttcacacatacccacaggtctcccagtttttccactaatttccgcagaactaatgcaagttcttgtaattgtacgtgataaaaatatatagttgaacacaaatttaagatatacagaaagaaatatgtttacaacaacaacaacaacaactacgtgagggacatacactctgctcaggttactgagggaaaattgtagtcctgaagctcctccttggggcacgaacttggggcttgttaatttggaaagtcccactagtaacattaaaagtctgatattaataaggaatgaaagctttcggaaagaccatgacaaaggaatgtgaagccttgaaccaaataatgagctgtccggaagcaggaagttttgtaatgtttcactatgaagtccacagttttgtaccacttgatgtattacattgatactctctcattttagatctcttgttcaaataatagatcagacttccatacttgtcaggtatctctgtacttcttcaccttttcagtgaaacaaaagagccagcaagtctgagaatgtctggaatagtcttcattatattttggtgaagagtgagtgggatgtgctgtgaataacttagggaaacagtaagacttctcatataagtttgtcagcaaaataattgcatttctcgtatgaccagccatattgttgtttgagtatgcttatgtaatgctttaatttctttagtacctgttagtttatgttcaggtgacttaacagggtaaaaacactgcataattgccatcacagcaccatgacaagacagtggaatttaattcaccacaataatactttctaagtgttgtcaccagcttaagaagtataaccaaatatcatggatattaaacttttaacatatatcacagaattcataacctgccatttgattttattttgacttttaggacctttttgcactgttttaagcctaaggagtatgtggatgcttaaagaagtgatttccaaactttgtcatgccatctatccctccttctacattcctcatgtcaaagaaaagctagagaattttgtcatttaaaaaggcgacgctgtagttgtaatgtttcctctgttaaggagaagaaaagctaagcactttgttgggcaagtggaaaatgcaatagtgggcaaagtgctcagaacctaggtaatcagtaaacttgattgtagttggctacgtggagaggttaatagggtagaaaataattattagtggttttcaaacttagctgtccattagaatcctgggtgtctttaaaaaaagaccattgtctttgctccaccccaggccagttgaaggccaaatactaagtgagggtcctaggagtggacagttaaaataataaataaataaataaataaataaataaaatctcacaggtgattctaatgtgtagccaagattgaaaactattccaggttatagggagggactatctatcatcaataaacagtatgcctttctacattgtgagttaaatctctgattttcctcagcaacttccttcttctcccatttatcttggttctaggctctgggttaaaatctatctcagctacttcctggataaattgtttattcatgacctttagttgagatggggatagttatagtcgataccttttaagattattaaggattaaatgagatagtacatgaaaagaatttattgcactgtgtggtactatgttcaatagatactagtttttattattctcctcctcagatatagttttccactttgagaaacaggtgtaaaacaaagtactaaaaaattagaactgccattatcaaacataacaatgattcaccttagtcttatttttccatttctaagcaatgtgtatgtgcttaaattactgtgtttgaagtattttgatgacaataaggatctttctgcattgaaaacttaacctgttttgtggcgacataggtaataatagaaaacttttttttttaacatggctctgtcatgcataattcccaggcacactagcacaccatgccagtgggtagcccagttaacatctataaaggtttttagaattggtgcatatgtattactataactgttgagcacattcaatttttcttgctttaaatataaatgggaagagctattagaacagttgtagtaagactggctaaatttaacaccccctcctccaccttttttttttattaggtgctgatcagagcagtcttcccttaccaatttgaaagtaattgaccatgtaaactgaatcatctgtagtctagatcagtctagaaggatatagatcaatccatatgtttttcacagatgtaacttttgagtagccctttacaattgactatttctgctctttttttctactttaatatattacagtattactgtttattttagaaactggtattctcacgtgacgtgattggcatgtcattgtggtgatgtgagaaagaaagttaccttccattctctaggttagtctctaggcataatcagatttttgtgacataggatgcaacatgtttaatttgcctaaagtctgctttaaagtggcttttaatgcaaatattttcctttttttaaatacaaatgttttcatcgtgacccccaaatcagacttactttttatacttctctcatgatcagtattcttttctgacattcttctgtttaagtataatatttcccttcattgttagatttctaggtagcaatatggggaaatcttgtgcagaagcatattttgaggaaagtggtattggaaggaaggaaaataaatgataaattcctgttattgcatagtatttaggtacatgtaacctaaaaggcttacagtcaccattcaattaaaagtagatttcctttttgctttcatggtgacttctcatataattgacgatgaggaaaaatagtttctaaaataaacagtaatactgtaaaaagactattaggtagtcttgaccagattggttaatattttaaaattatggagttccttatgcttcaaaatatatttgcaaaatatgttgatcatttattgaagagtttcgtttttcacagtggtaactctaaaggatgtgtcagtctaaaagttagaatttaaaagtagttttaggccaatatttcctaggtaatctgtcattataacagacattatttgctcccatctccactttctacccttcttgtatcagaatcaaagttggggctttcctagagtatgtataatctttgacttctaactcaagccctatcatagagccaagttattttgctgaggtttgtttctaatgttattctcttgtaattttaccgtgtcttcatgtactctcttctgaggtgtaatcttaccatctccacaaataattccttatccttcaacaccagtttttatcaatggctgtcagaaaccactttttgcttgttttcattccagatatgttatggaagattaaagatttagaaatgtgacttgaaaatgtttgggaactacactgggatggaatatgacttttgaataagagacatcacaagaacaccttagtgtttattgatctttcaaatggtagagttagtaaaaaattgtcttgaaatgtgtcagtatttcaggactgctgctagatgctgtggttagcagtaagagacctgaatgtgagttgccaaattacagaatcatgtcaataaaacaattttgttaaactttataattcctacttctttctcccacccagcataatatttaagacacattctatttatttctaaagattaagctttctgttttgaaatttttgaaggcttcattgatgtatctccacaggctataagttcttgagggcagaggttgtgtctattgatctttctttactatttaatatagtgtccagaatattatagttcctataatattttctaaatgaatgaagtaattgtatacatctttggattttgtcagaattgccaaatgaatcactgttttcttctctgcacctccgaacaaaggcaaacaatgttctataatagaatacttatcacactgaaaagataaatagctcctctgttttaaaaaatgaaatctggtaattgtgaggaaattatcaaattaaggtagattttttttttataacttttttttttttctccagagatttttgttttctttttttagagacagaatctttccctgtcacctaagctggtgggcaggggcctgatcacagcctactgtggccttgacctcctggctctagtgatcctcctttctcagtctctgaagtagctagaactacaggtacacgctgctatgcctagctaattttttaaaaaaattagttttttggtttttgtagagatggggcttcactgtattgccaggctggttttgaactcctggcttcaagtgttcctcctgcctcagcccccacaaatgctgggattgtatgtataaaccaccatgcgtggcttcccagagatttttcttattccatatagtttgagaggaaattaatttgattataatttggtaatttgatataatacatatctttggtaatgtgaagaaaaaattctatgcattttatttggaccaactactaaaacttcttaatgcacagattttcttgaagaaatgagaaatatgataattaactgaggtttcaaagtttttactgtatttgaatttgagaatttatatgacatttggtccaaagagttcagtgttggatttttgcctaccaagggatatgaaattgattagtacttaaaattttatatgactagctaagtggaaaagagggattaaatggtgaaaagtaaattatatgtaattattatgatactaatcaaatactattctaaataatttaaataaataatattactctaaagcagaattccagctggagtttatactgtcaacaggttaaaggcccaggatattaggccagctgtatactcagaaagaaatctttcaaatctctaatagctgtgtctggcttaggtttctaatctgctataaagctatttagattttattaataaaattaagctttaaatataacatgtagcaacagatgctcttaagtatccttcaggtatcttctgtgtaagattgtgtgtgtgtgtgtgtgtgtgtgtgtgtgtgtgtgtgtatgtgtgtatgtgtgtatgtgacttttgacccaatcagaatattgggtctggaagggaagagtctagggatttttatttttggtaggagtgttatgtgattctatcagacatatttggaaagtaatagatggtactgtggaaaaagtgtggtctttgatatgaggcagattggtttcaattctcagtcacttcctgacagtaaccataagcagattaacctttccgaacttcagttttttcatctgcgaaagagataatatccaccttagaggttacgtgtgagagtcagaatttatctaattaataggcattcaataaattattacttatgacatattttgatgtttaaccctgcatgcacatttttttggttattctttaccattttgtgggaagtcagtctaaaatgtgaagtatgcttttctgctttaaaacaagattctgagcatagctcagaattatctaattgactagaggaatcatttaatcaaaagcggctatcagattgatacacagtgatgccttagtggccctgaggtatgttggagtttgagaaccttctctaaatggcactttcatttaaatttcatatgtgggctgttctttttggtttgctttcttctgtctttgtaattggtcagctgttcttggaagcaaaacaaccaaccagccttattagaactgcatataaagtaagagaagttcatcctgattgttgaatgtagatgcttgggttttgatgcttgggttttacaatatttattttgttttctcagagtattttttgcttaatctttgattatcagctgtcttgttgaggtttcctgataagtaatttaatgagtatttgttaaatgcccatttttctgccaggtattgcacaaagctctgggtatataatgaaacccaaaatgaaacacacatagtttctgccctcatggagtttacagctaatagacaaattttatctgataaagttgcactgaaggaaatggatgagatcctgtgattgaaaataatgtgattaggaagaacctctctgaggaagctaacatttaggaaggatgagagtcctgtcaggagcccctggatctggagaacagcaggtgccaagactccaagccaaaacaagcttgacttgcctgaggaactgaaaggatacctctatattatggctagaatatagtgaacaaaggggataatgtcttgaaatgaggttggagggttcagtaggggccagaaaggattgtaaaggaattagaatgaaatttagaaggttatagaagcagcttccataagacatgatagtggccccagctagggtgttgatctctagattaaaggagttattacagttctgtgtgtaaaccatcaaatttcacagcttttcctatgaggtatggaaatacatagcagtggccacttttgctgtctaattcctcagttcttatgtttgttttggtctgtttattttttaattttagctttgtgtaggctgaggttaaataactggctacccttactgttcactgggagtgattttgatggcatacctgcactttctgttctgctgctggggcagctagtatgccaagagaatagcacatgccagaagtagagagtgtttcccacaagatcatagattttgaagtgggaaccctcgtaaatgtgatatcctttagctgtaaggtgtgtagtatgtgacagccctcagtacatgattcattagatttgaggaaaaaaattgtgttttttatatcttacatttaaaactcagttgcatccgtaggagctgaaatgttctcacagtgtccctgaagaataatttttttgttcttaagctttttttctctcccactatctacttaggatagagttggttggacttgaaggtaacctaactttgttattttgattgataaaaaaagtgaatgtactatatatagtgagcttcctgcaagaacttcttgttttattctctttgatcttgcattgtagtcataatgtgggccttggttagttcagtggtggagttcctatgtacccagtctcctttcttggtcttttctaaactgctcaattataaatgttacttgaaatgagtatttttgttagtctatattgtaaatcaattcaaccatatattttgcttaaatgaacataatttagcatcattattttgctcttaagatttatagaagtatgaagaatattctaaaatatgtataaatcagatatacaaaaatcttttttctgtagttcagaaaatttaaaagttgttaagttagatcagctgcatccctatatcgccagaagttagttatactgtgcattttcatcagtatacacttatatagctttcactgcttaacaacatatttaatctgttaataatggaaattataaccttaataattaaaaattgataaaatgctaatgctagattattataagactatgtataatggtgaggtttatgatagagtaaatttaacacatgctttggagaattaagtctttgatttcactagtttcctgaatgagattaaactttcataaaaccagatgaactcaaatattgttcagaatgtggttacagagttaagatttttagaattattctgaaacccaaatatacgtctccaactccagggtctctgtatcttttgtataaatagagtatactttcaattagatcccatcctccttgagctacattgatattcagacgtatgttgaatcaaccagataaacttaaagcatgatttatatgcatcaaagcctgttaatttttttccatagttatgactttatctccaaaactagctaaaaatttgagttcattgagctcaaagttcaacattaggaaataagcactctcttcatgtgccatctgcataaccaatatgttcagtttgaaatttctagttcatatgctcataggtcttgtcatatctgtaggaacataaaaattctctgtatctatagatttgtacaggtggaatgtctcagaatccagaatatccaaaatggaattcataatctacaccccaaatcagcttcaacggcagccttccattctcagttgatggcagatcgaggaccctgtttgtttagatcaaaaactttttgatgtattcttgattttcctctttctctttcactacatccattctgtcttgacatcttggctctgtcttcaaaatttggccctattttgccacctacacgactggagtgaattgccagtctcccttctgccttacgcttaatgtatttcttaagtcagttatggtggcatgtacctataatcccagctacacgggaggctgaggcagaaagatcacttgagcccaggagtttgagactacactgggcaacatagcaagaatccatctaaattacaaaaaatatatatatatttttttcttccccctgtctccacctttccacctttgcctctcctcttatacaaccattttggtacatctgctatagtgatccttttaaaacataagtcagttcaagtcttttctctgtatcaggcccctcaaaggttccccatctccttcagagtccttttaatgttctaccagaccctccctgatctggcccatcattacttgtctggtgatctcagtttctgcttactattggcttcagtttattttgatttctaattatcgatggctttactacatcttgacttcaatttaagccctctctctgtcagctctgcatgttaccatctatttgtcttatgttcagatacctcaagagagagctgattgagttagttaatgttatctaagttaggcaggactgtttggccttgccattccatgtgctgctacccagcccagggattagctgttcttaaagcagatgcccacttgtgatctaattagccaaagtatagggagttcctagttaggcatgcggagtaacagactactctctctagtatacatggttttgagctgtgtagcatcttttcagattgttgtattataattaatttaattataagatatttctgttttaaaaatttcactgttaaaaatatcactgtaactcagaagaaaagaaacattgaacatatatttttgattaagggcaaaacaagttgaagcagtggattcttgcatttctgcatttaaaaagcaaaattcgttatgagttcaaaacatgtcttaatttaaaatgatagctcagtagtgaatgccaagagacattgttaatatgaggagatacaaggaacatagaagaagttaaaactgaagtaagaaggacagaggattagatggacttgaactatggaaaacattgaaatgcattcaagaaaactattgattagtgaacctaaatttccttgtttacttatcttaaaatacctagttaataccaaataaaatattcaaataagaaaacaaaattagggtggtattgtacattataaaatatttgtctgccgggtgtagtggctcacgcctgtaatcccaatactttgggaggccaaggtgggcggatcacttgtcaggtgtttgtgaccagcctggccaacatggtgaaaccccgtctctactaaaaatacaaaaattagcccagcatggtggcgagcacctgtaatcccaggtacttgggaagctgaggcacgagaatcgnnnnnnnnnnnnnnnnnnnntatcactgcagatactttttattcattaacatatctgtgccatgttgcattttctcttgatacatttctggaagtagaattactgggtcaaagggtaggaattttttttttttttttttttttttgagactgagtctcactgttgtcagcccgggctggagtgcagtgacgcaatcttggctcactgcaacctccgcctccgggttccagcaattctcctacctcagcctcctgagtagctgagattacaggtgcccaccaccacatccagctatttttgcatttttagtagtgatggggtttcaccatgttggccaggttggtctcgaactcctgacctcaggtgatccacctgccttggcctcccaaagtgctgggatcacaggtgtgagccaccacacccagccagggtaggaatattttttaagacccgttttacatactaccagatggcactcctgaaaattctatcaacttgcaagatttttgttcttttcagttaatatcatggtatattgaattttcttcttcaacattttcctccattgagaaagatggtaaaaatactgaagatacataaataaatctaaaaatgaaagggagggaaggtaaataagtttatgttcaatggtatttctgtgtttttagtttgcaaatttcatttttaatggttgtttaatattctgttatattgagataagataattttcttaaccattcctaaaatgttgtaaatagatacatatttatatttgtgaataaagattcaatgaacttgtttatgcataaatttaatccacatttcaagttattttttaggtaatattacatttctaaagagaaaacagtatgacaaaggtataaatattttcaatgccaaataattttaatggttgtaacaatttatagttccattgacagtgtgtgatatttttccatcttgaccttcttgccaacataaaatattttttaaaatttaattagtcttgtagataactgaattaagatgccacctactttaaatcatatttttaaaaattatccaagtgttacttctggctttttggattagtagaatgtttggttattagagtctgaagggggttcagcttcctactcaatgcaggaatcattgctcttctttcaagtacatcaaattattattttatgggatgaaacttggcctttctaatactgtgctgagccagttgtactttgtcttagaataaaggaaattatttttaccatatataaaaagttttatgtaaacttgtaggtacatttataatgctgtcaattgaaaacaaaacatagatgccattttcattctaacagtctctgcctcctgctgaacttaaaaaagaagccagaactaaggtattgtcaaaattaagtggtttatgtcaaaaataaatcattagaggtgatattttacagttatattatcaaacaagaagtgtgacttttcctatccatttaataaaataagaccgtcttgctaaaattctacctgctactattgttttggttggtctagatttggattaaaaaaaaagaaggttttggcagggatgaaaaacatagcaaaggagatatttgctgtggcctgtgccaaataagaaattctgacattcaagctctttgccaggagaaagcatgctatatgaaagaagacttgctgaaaagagttgttttcaactactctgatgagaacagtcttattagtaaagaagtgtgtaggaaagcctggattgtggtagtttgaataatgaatgggaggtaacgtaaagatagttaatgtaaaggagtctttcaaaacattagttgaggaaggaaagaaatagatgccatcagacattgagagagaagaagaaataaggattcacatcctcaggtggatagactaattcagatttgtaggctatgtttaaggagcctgaagcgaggtagaaatacagtgaattgcagaggagactggaggagatgcactcagaagtaaatggttagtttttggaagctttcctccattgagagatggtaaaaatactgaagatatataagtaaatccaaaaataaaagggagggaaggtaaagcagtttatattccatgacatttttttctctcagagttgacaactgtggttatttgcaaaaaaatgttggttgtgaggataaagtggagtacctaaagacaggcacaacaactacggagcatggaaaagagaacttactggggatgaataaagattgttacaataatactcatgagattagaaataagatatgtatgttatatatatatttattattggtgatacatttataaatgtgatttttctccagtagctccaggcagtgtgaagaaggtaaacaatttaattgaacctgggttggcaagggacactgtagagatgattaaaggtgtttgttggagtatgttcaaaatgattgactatgtagttctggcaaataaggaaggaaatggagtcatagggagctatggaggggtgggaagcaatatattacaaccagaggccaaaaaacaaatttagtaaggatgggagaaatgaaatgattgatggcagtggtaagagaagaattttacagttcagaatttcagaggtgatacagtcccaagtgatgacaatatgcagaatatatcacagtgagtaggttgctgaattagatggaggtgcaggaggtaaagttctttagaatagataaggtcaggagtgaactgtagttgaggatttctaaggaaagagtggcatttcaacagggtttttggttaaagtgaagatatatacaagtatgtggtgcttaactatggggactactctgataaatgggtcagtaggcaatttcatcattgtgcagacatcacagagtgtgtgtatacaaacttaaaatggtgtagcctactacacatctaggctatatggtatagcccatagcccttaggctacaaacctgtacagtatgttactgtactgtgtattgtaggcagttataacacagtggtaagtttttgtgtatctaaacatagaaaaggtacagtaaaaatacagtattaaaatcttgtgggaccaccttctagtatgtcctgactgaaacgttgttatgtggcacatgactgtatgtatttaaggtttgttttgttttttaagataagatataaggaggtatcctgatagctgcagatcaacagattgagggtttcaaggtctatcaggaaagataaacttgaatatgatgatcatgagaaagcaggataacagattggagtggtttgcagagttatgactatagactggaggaatgtagagatagtgaaatggatgtatgtgggatatgagtaaaacaagcctgtttcaagattccatttagatttaggtgtaaagttggagtccccccttcaaaactttacagtgtattacatgaactttcaaaattatctcaaattatataaaagtaaaattggtctcgtgtgtgatttcttaaggaaacaaaggaagctgtaaaagccataaaagcctgcactgaagtgttgcatggaatgtgctcagtagttgtgatttgaatgaattctctgttctccaagtactggtagacttctgatagataaaagcaagataggttgtttttattatgtcttttatcttcttgttatatttaccattctttgaaaatagtttaaatcttttatcaattctaaagccatggaatattttaaccatgattcaagaaaaggtcttttaggtaataggaatagatataggtatagtacacgtctacattttctttcataccatctaatgcactgacaaataggtgttcaatggaacctaagacggttcttggtagcactttgtccattcctacttttttattttttctctccctttttccttattcttcccctcctcactctttttcctgcatttttccttctcatcttattgcttgtgtaggacacctgctaaaattcacaggtattgtttgtttccaccaataacattaaaagctggaaaaaatcgctatcccacccattaaaataatatgctttgtagttactttttaagatataaagttggtagctcaaattaaatgaaccatttatatttttgtttacatactgctggttaattaacattcagccccttatcattatgcaaaagtttccatttaactgctaaaataattgttacatttcataaattgcttgttacagttattttatctcaaacttccattttatgtctaaaacttcctccatatgtgaaaatgctttctattgacttgacctttaaattaaatggtctacatttttggcaacaataacatgtaataacatattcttcttattttttaaaatagatttggactgagcaacaaatttgaatctgaattcccttcttcattaactggaaaagtgagtgtctcatttatgtactatttgtatgcctcaaaatgaaagtttttttctgagaaaattagaaaaaagtatgctcatcagtcatgttttttgacattaatattgcattgttattatttcttaaaatttttctttaggtagctcctgaagaatttaaagccagcatcaacagagttaacagttgtcttaagaagaaccttcctgttaatgtacgttggctactttgtggctgcctttgttgctgctgcacattaggttgcagtatgtggccagttatttgcctcagtaaaagagtaagttgaattatatattttaatttaaatttagaagtggacaagcaagtcttgcatttatctagtttttattttttgtattgaatgaatcacactatcctgaataaaatatgaaaataatctgatccaggagaggagtgagtcagtaaagttactatatatccaagtgctgttattaaatagccatctaaaaattatatttataattttagaagcaaggagtagtgtatggcattgtctgtatctgtacattgacggtggtgtggtatagtgatcaaggatgctggcttcagctctaccacttttctctgtgaccttaggcacgtttcctaacctctttaaaccctacttgacacaactgtaaaatgttcacctactacttgaatataaaggtaaaatgaaaatgtttggaaaactcttagctgaatatctcaaaggaagtggttaataagtattaattaatagtattcttactgactgtaagatggtacccatacaagaaataaaatggttacaatggttgtttcttgttggtaagattatgggacattcttttctgctttttatattttacaagtttcctgtagtgagcacaaagtgattctgtaatcagaaaaaataatttcaaagactcattattttgactgcttataataaaaaattctggccaggcacagtggctcatgcctgcaattttaacactttgggaggccaaggcgggcggatcacttgaggtcagaagttcaagaccagtctggcgtacatggtaaaaccctgtctctactaaaaatacaaaaaattagccaggcgtggtggcgggtgcctgtaatcccagttagtcaggaggctgaggcaggagaatcgcttgaacctggagggcgaaggttgcagtgagctgagatcgtgccattgcactccagcctgggcaacaatagtgaaactctgtctcaacaaacaaataaacaaaattttaagatgttggtagagatatgacaaattattatagattgaatgtattatattcttgttaaaatttttaaaaattgtatttatatgtataaaaatgatactttaaaaaaatttttttaaataaataaattttattttttaaaaatgtatttaaaaaaatagagacagggtttcttttttttaattattatacgttaagttctagggtacatgtgcacaacgtgcaggttagttacatatgtatacatgtgccatgttggtgtgctgcacccattaactcgtcatttaacattaggtatatctcctaatgctatccctcccccctccccccaccccacaacagtccccggtgtgtggtgttccccttcctgtgtccatgtgttctcattgttcaattcccacctatgagtgagaatatgcggtgtttggttttttgtccttgcgatagtttgctgagaatgatggtttccagcttcatccatgtccttacaaaggacatgaactcatccttttttatggctgcatagtattccatggtgtatatgtgccacattttcttaatccagtctaccattgttggacatttgggttggttccaagtctttgctattgtgaatagtgctgcaataaccatacgtgtgcatgtgtctttatagcagcatgatttataatcctttgggtatatacccagtaatgggattgctgggtcaaatggtatttcaagttctagatccctgaggaatcgccacactgacttccacaatggttgaactggtttatagtcccaccaacagtgtaaaagtgttcctatttctccacatcctctccagcacctgttgtttcctgactttttaatgatcgccattctaactggtgtgagatggtatctctttgtggttttgatttgcatttctctgatggccagtgatgatgagcattttttcatgtgttttttggctgcataaatgtcttcttttgagaagtgtctgttcatatcctttgcccactttttgatggggttgtttgctttttcttgtaaatgtgtttgagttcattgtagattctggatattagccctttgtcagatgagcaggttgcaaaaattttctcccattctgtaggttgcctgttcactctgatggtagtttcttttgctgtgcagaagctctttagtttaattagatcccatttgtcagttttgacttttgttgccattgcttttggtgttttagacatgaagtccttgcccatgcctatgtcctgaatggtaatgcctaggttttcttctagggtttttatggttttaggtctaacatgtaagtctttaatccatcttgaatcaatttttgtataaggtgtaaggaagggatccagtttcagctttgtacatatggctagccagttttcccagcaccctttattaaatagggaatcctttccccatttcttgtttttgtcaggtttgtcaaagatcagatagttgtagatatgtggcattttttctgagggctctgttctgttccattggtctatatctgttttggtaccagtaccatgctgttttggttactgtatccttgtagtatagtttgaagtcaggtagcgtgatgcctccagctttgttcttttggcttaggattgacttggcgatgcgggctcttttttggttccatatgagctttaaagtagttttttccaattctgtgaagaaagtcattggtagcttgatggggatggcattgaatctataaattaccgtgggcagtgtgtccattttcacaatattgattcttgctatccatgagcatggaatgttcttccatttgtttgtatccttttttatttccttgagcagtggtttgtagttctccttgaagaggtccttcacatcccttgtaagttggattcctaggtattttattctctttgaagcaattgtgaatgggagttcactcatgatttggctctctgtttgtctgttattggtgtataagaatgcttgtgatttttgcaccttgattttgtatcctgagactttgctgaagttgcttatcagcttaaggagattttgggctgagacgatggggttttctagatatacaatcatgtcatctgcaaacagggacaatttgacttcctcttttcctaattgaatgccctttatttccttctcctgcctgattgccctggccagaacttccaacactatgttgaatatgagtggtgagagagggcatccctgtcttgtgccagttttcaaagggaatgcttccagtttttgcccattcagtatgatattggctgtgggtttgtcatagatagctcttattattttgagatatgtcccatcaatacctaatttattgagagtttttagcatgaagggttgttgaattttgtcaaaggccttttctgcatctattgagataatcatgtggtttttgtctttggttctgtttatatgctggattacgtttattgattttcgtatgttgaaccagccttgcatcccagggatgaagcccacttgatcatggtggataagctttttgatgtgttgctggatttggtttgccagtattttattgagaatttttgcatcactgttcatcaaggatattggtctaaaattctctttttttgttgtgtctctgcccggctttggtatcaggatgatgctggcctcataaaatgagttagggaggattccttgtttttctattgattggaataatttcagaaggaatggtaccagttcctccttgtacctctggtagaattcagctgtgaatccatctggtcctggactttttttgattggtaagctactaattattgcctcaatttcagagcctgttattggtctattcagacattcaacttcttcctggtttagtcttgggagagtgtatgtgtcgaggaatttatccatttcttctggattttgtagtttatttgcgtagaggtgtttacagtattctctgatggtagtttgtatttctgtgggatcggtggtgatatcccctttatcattttttattgcatctatttgattcttctctcttttcttctttattagtcttgctagcggtctatcaattttgttgatcttttcaaaaaaccagctcctggattcattgatttttttgaagggttttttgtgtctctatttccttcagttctgctctgatcttagttatttcttgccttctgctagcttttgaatgtgtttgctcttgcttctctagttcttttaattgtgatgttagggtgtcaattttagatctttcctgctttctcttgtgggtatttagtgctataaatttccctctacacactgctttgaatgtgtcccagagattctggtatgttgtgtctttgttctcattggtttcaaaggacatctttatttctgccttcatttcattatgtacccagtagtcattcaggagcaggttgttcagtttccatgtagttgagcagttttgagtgagtttcttaatcctgagttctagtttgattgcactgtggtctgagagactgttataatttctgttcttttacatttgctgaggagtgctttactgccaactatgtggtcagttttggaataggtgtggtgtggtgccgaaaggaatgtatattctgttgatttggggtggagagttctgtagatgtctattaggtctgcttggtgcagagctgagttcaattcctggatatccttgttaactttctgtcttgttgatctgtctaatgttgacagtggggtgttaaagtctcccattattgtgtgggagtgtaagtctctttgtaggtcactaaggacttgctttatgagtctgggtgctcctgtattgggtgcatgtatatttaggatagttagttcttcttgttgaattgatccctttaccattatgtaatggccttctttgtctcttttgatctttgttggtttaaagtctgttttatccgagactaggattgcaacccctgcctttttttgttttccatttgcttagtagatcttcctccatccctttattttgagcctatatgtgtctctgcacgtgagatgtgtttcctgaatacagcacactgatgggtcttgactcttcatccagtttgccagtctgtgccttttaattggagcatttagcccatttacatttaaggttattattgttatgtgtgaatttgatcctgtcattatgatgttagctggttattttgctcgttagttgatgcagtttcttcctagctttgatggtctttacaatttggcatgtttttgcagtggctggtaccagttgttcctttccatgtttagtgcttccttcgggagctcttttagggcaggcctggtgctgacagaatctctcagcatttgcttgtctgtaaagtattttatttctccttcacttatgaagcttagtttggctggatatgaaattgtgggttgaaaattcttttctttaagaatgttgaatattggcccccactctcttctggcttgtagagtttctgccaagtgatcaagtgtttctttttttttttttttttttgaaatggagtctcactctgttgcccaggctggagtgcagtggcatgatctctgctcactgcaagctccacctcccgtgttcacgccattctcctgtgtcagcctcctgagtagctgggactgcaggtgcccaccaccacacctggctaagtttttgtatttttagtagagacaggttttcactgtgttaggcaggatggtctcaatctcctgacctcgtgatccatccgcctcggcctcccaaagtgctgggattacaggcgtgagccaccgcgcctggccgagacagggtttctatgcccagggtggtctcaaacttctggactcaagcagtctgccctccttggcctctctaagtgctgggattacaggtgtgagccactgcacccagccaaaaatgaaattttgttaagttgaaaatgaatgaacagttttatgtggctacattttgacaaccaataagagtaggaagtatggatgatcaaattctctttgtcccttgatttctgttataaaataaaagatatattcctactaaaaatttttaaactggtacattctattgataggaaggagttaatgcctttgtaatagaatgacttatgatatttacttcaatatttctaatattccttttttctaaaaatggttctttttttttcatcattctcaccagattacctttgcactacagaacattttttcgtctctggatccacagttgattttgtcgctcttgtagtttggatcccctcactcccttctgctatgtgggcatttccattgtttcaatgcctgctatgtctctcttggttgggaattgccatcatgtaacccagaaaatcctaagagttttaatactgtagatacctttgagatctggcttgtttgtttgtgttggttttgttttgataccctttttttaaacctttaaatgagtaataagatgttgcagtgtgtacggtgtatttagaaaacaaaggtaaatgagttaaactttgcattcatatcaacttgagatcctttttgaaatgccttcattaaattccttcttatgtgagatgtaagattgactttttaagctagtttaatctgtagtttctgaaagtacatttcatttagcattgtagtgttcagtcttaagttctctctttgtattttatatgactagatggaatatttatttgatgcatttaattttatatggagtactatctagggagcataaacaaacatgacttgctttttaaaaaagccatacatatctgtccttgggtgtaaactattacataaccatggtaagagtgacacttcatgcatgtgtgaaggatattaccggccctggagaaagaggtgctttgtaagatggaggcaaaataatttggatttttttttccttttttttttttttaaattatactttaagttctgggatacatgtgcagaatgtgcaggtttgttacataggtatacacgtgccatggtggtttgctgcacacatcagcccatcatctacattaggcatttctcctaatgctatccctcccctagcccccaacccctgacaggtcccagtgtgtgatgttcccctctagagcagggatttttaacgttttatttgccataaatccttttgatggtttagggaagcctatgaatgctttcttagatgctttacatatatttaaaaatatttaatgtattctaaatgcataaggtaaaaatacatggattacagaggaaaccaattatataaaatatagttatcaaaatactagaaaactttaatgtggtttataaatatgtttattaatgcatacaaaatgagatagcaacaaatccatgataataatgatatgataggaagaatctgtgatttctttaagtgatgaaggtgcaggtcctgttcagtctattgcagttagttgcatacattcataacctaaggaaatgtaatacatttcagttagtggttaaaaagatgtattttcatttcactcactttcacagattcccagaattctgtctaggtactgtatgttaagaaccctcgatcgagaggcatgagtataaaaaattgccagcctgtgaacttctgttttctttcttgtgatgtgaaatcctcttatgtggttagaatggtctcagactctaagacaaatcaggaccaaaggcatacttgatatgcagctcagtgcttttactttcttcacattattcactgatttggaaaactgcagttctgtcttgccttcaaaatccatcacaacacgaggtcaggagatcgagaccatcctggccaacatggtgaaaccccatctctactaaaaatataaaaattagctggcatggtggcacgtgccagtaatcccagctactcgggaggctgaggcagaagaatcgcttgaacccaggaggtggaggttgccattgattgtgccattgcactccagcatggggtgcaagagcgaaactctgtttcaaaaaaaaaataaataatgtgtctgtaaacagaaacacacacaaaacaaggttacgtattgatccattgatgaaaatgttgtgaccagaggcttgaagaacctaaccctgtatttccccagaagtaatagttccctactttctaattcagcattcgcagagactctacagaacctaactacctgaataacaagaacagactgtgctcggtctccaccgagcgacttgctcannnnnnnnnnnnnnnnnnnnttccgtctcaaaaaaaaaaaaaaatctatccccaacttagtgccctctttttatgacctgatattattcccaagaccttgtttttattctgttctattattattattcttattatgattgagacggtgttttactcttgtcatccaggctggagtgcaatggcatgatctctactcacagcaacctcctcctcccagtttcaagcaattctcctgcctcagcctcctgagtagctgggattacaggcacctgcagccacacccagctaatttttttttttttttttttttttgagacagagtttcacttttatcacccaggctggagtgcagtggtgtggtctctcagctcatcacaacctacacctccccggttcaagtgattctcttgcctcagcctccggagtagctggaattacaggctcctgacactatgcccagctaatttttgtatttttagtagagacggggtttcaccatgtttgccaggctggtcttgaactcctgacctcaggtgatctgcccgcttcggcctcccaaagtgctgagattcaggtgtgagccaccgtgctcggctaatttttatatttttggtagagacggggtttcaccattttggccaggctgatcttgagctcctgacctctggtgatctgcctgcctcggcctcccaaagtgctgggattacaggcgtgagccactgcgcccagcatgttctgttattttgattattttttagaccttccaaattgccttttttcttaactacctttgcctatttttgaaaattgttttttaatatacagtaaaatttttataaacagttctgtgatttttgataaacgcatagagttttgtaaccaccaccagaatcaagatacataacagttttccataaaaaacttacttgtgctgtagtaagttttttacttactacctctgtagttgaaccctcgtcaactcttaaaccctggcaaccagtgatctgttgtctatccctacaatactgtcttttctagaatattatataaatggagtaaaatagtgtatataactttttgagtctggcttctttcatgtagcttagtgcatttgagattcatctattttcttttatgtattaatagtttattcttttttattgttgagtagtattccattgtatggatgtatcacagtttgtttatccatttatcagttgaagacactgagtttccagtttttgaataaagcttgccataaacattcacatgcatgtttttgtgtgaacacaagttttcatttttaggaaggggattgccgggttatatggtaagtgaatgtttaatttataaaaaatctccaaactgttttccaaagtgggtgaaccattttgcattccagccagcaatgcatgagagatccagttgcttagcatccttgcaggacttgatatggttagttatagaaattatagtcattctaaaagatacatagtagcatctcattgtggttttaatttgcattaccctcatgagtaatgatattgagcaccttttcatgtgcttatttgccatttgtacctctttgttaaagtgttcattgaaatattttgcctatttaaaaattgttatttcttgttgagttttgagagttcttcatataattctgaaaataagtcccctggcagattcgtgctaatatatatttgcagtctgtagctgtcttttcattctccaacaatgtcttcggcggaacaaaagcttttgcttttgatgaattcatcgctttaaaaaaaaatagattgtacttttgtgctgtatctaagaatttgcctaaaccaaggtcatgaaaattttctcctgtgatctctttacttttaggtgtgtgacccattttgactcaggtttttatatgagtgtgaggtatgggtgaaattttttttttttgcatatcactttctaggttttccagtaccatttgttgagaagactatcctttttcccttgaattgccattgtacattgtcaaaaatcagtcaacaatacctgtgtaggtctctttccatactctattctgttctattgatttgtatgtctatcttgattaaatatcataatgtctagtttactgtagcttttttttcttttttaattaaaaaggagacagggtcttgctgtgttgcccaggttggtctcgaactcctgggctcaagcgattctctcatctcggcctcccaaagtgctggaattacagatgtgagccactgtgtccagcctactgtagctttatagtaagttttgaaatcaggtatattgagcctttcaatttttttcttatttttcaagattgttttggctgttctaatttctttacctttctttataaattttagaattagcttgtcaaatatctataagaaacactggtatttgattggaattacattcaatttacagatgaattggagagaattgacatcttaacaatattaagtcctctaaaccaagaacatgacatagtctccatgtatttaggtctttgacgttttttttgttagagctttgtagttttttgcgtagcatatagattatgctcatgttttattagctttatacataagtatttctttgggtttggcgctattgtaaatggtattgttttttaaattttgatttccagttgttcactgctagtacataaaatacagttgatttttgcatattaacgtcatgtccttcaaccttgccaaattcacttattaaattccaggaacttttttgtagattccttgggattttctacagagataactatgttgtcagaaaataatgacagttttattcccaatctgtgtactttttcttttccttctctttttcacagtgtaggagttctaataaaatgctgaataggagtgatgagagcaaactccttgctttattcttgattttctgtgttgtttttctgttttcacttccattgattttttgtttttattatttcttctccttgctttggatataatttactcttgttttttagtttcttaaggtagaagtcattgatttgtcttttctttttttcttgtataagcatttaatgctctttccctctaaagcactgttttgactatatcctacacatttttatatagtatttttgttttcttttggttcaaagtatttgtgattttctctctgagtcatggattatcaagaagtttgtttaacctccaaatatttggagatttaccagaaactcttctgttactgatttctagtttaattttattactgttaaagcatatacttggtgtgatatcagttcttttaaatgtgttttattttacagccttgaatacagtgtattttggtaatggcatgttcaaaacttttatttatattttactagctttattgaagtgtcagtgacatacaataaactacacatacttaaagtatattatttgatgagttttgatacacttgtgtgcatcaagatagtgaacatactcatcatttccagaaacttccctgtgcaagtgctgatctgctttctggcactatagattaatttgctttttctagagttttatctaaatgaaatcatacaatgtgcattcttttttgtcttcttgttttattttttatttatttatttttgagatagggtctcattctgtcactgaggctggagttcagtggcatgatcatggctcactacagccttcccagacttcccaggctccactcatcctcctacctcggcctcccaagtagcttgggccacaggtgcgcatcaccacgcctggctaatttttgtatttttggtagagacagggtttcatctctcaaactcctgagctcaagcagtccacccgcctcagcctcccaaagtgctgggattacaggtgtgagcctccgtgcttggccagcccctttttcttttacttactatgattttgagattcaacaatgttgttgcatcagtagttcattcccttttattgctgaataatgtttattatatggatatgccacatttgtttatctatttacctgctgatggacattttggtctgtataaataaagctgctgtgaatattcttgttcaggtctttttggggacatacactttttttttttttgagtaaaaattcctgagtggaatgccttggtcatatgtcatgtgtatgtttagcttcctttcctttcttttttttttgtggttgtgggacaatccatggaaatgcatttaaggaactgagaaactgccaaaagtggaggtactattattttatgatctcatggtactgtaggatagattctgttctgctacatacttgtcaacatttagtatagtcttttaaagagttggggtatgtgtcccctctaaatctcatgttgaaatgtaatccccagtgttggaggtagggcctcgtggaaggtgattggatcatgggggcagataacttcacaggttggtgctgagttctctcaagatccggttttttaaaagtgtgtggcacctcccccaaccccgttgctcctgctctgccatatgagatgcctgctgcctttcatcttccaccattattataagctccctgagtcctccccagaagctgagcagatgccagtgccatgcttcttgtacagcttgtccaataaaacctcttcattataaattatctagtctcaggaatttctttatagcaatgcaagaacagcctaacgagattttagtaccactgtcttgataactgatagaactagtagacagaaaatccctacagatgtcagccaacttaacctaattgacatttataaaacactctaaccaacaataggcaaatacacattcttttcaagtacatacagatcactgagatagttcttattcaaagtaattaaacaagtcttaataaatttaaagggattcaaaacatacaaagtgggttatctgaccacaataaaattaaattaaaaatcagtaaatgaaaaatcgctagaaaattcccaaatatttgaaagctaaataaaatgcttctaaataactcattggtcaaagaaatcaaaagggaaatttaaaagcagaatgaattaaatgaagattaaaacacaaaatgtcaaaatttgtgtcatactactaaagcagtgttcaaggaaggaaatttataccactgaaagtctacactagaaagcctcaaatccatgacctttgttttcatcttaagaaattagaaaaacaagagcaaattaaatccaaagtaaggagggggaaaaaaataatggtcagactgaaacctatgaaatataaagcataaaatcaatagaaataatcaaacctttgagaagatcaataaaattaataaatctctaaccagagtggggaaaagagaaagaaagagataaattaagtttcaggaatgaaacaggtgatgagactaagaggttttaaagatagtaaaagaatgattaatgaatactataaactgtatgcctgtaattcaacaccttaaagtggacaaattccttgaaaaacaaaaactgtaaagcttaaccaagataaaatagatgacttgaaaagtcccatatcaattaagtaaattgaatttgtaatttaaaaacttccaacaaagaaaattccaggcccagatgcctttactggtgtattcttacaaaatttaaggaagaagtaatgcctgttctacacaaactcttctagaaaatcaagagaaaagaacccttcccagctcactttatgaggccatcgttaccctgaggccaaaaccagacagagatattctaaaagaaaagtctacagaaaaatgttcctcatgaacatagatataaaacttctaaacagacgtttagcctatcaagtccaacaaaaacatgaaaagaaagacacacatggccaagtacattgtccttcccaggaaggtaagtaaggttggtttaacatccaaaaatgcaatgaatgtaactcaacatatttctaaactaaaaagaaaaaccacacaacaatctctaaagtggcagaaaaagcatttgacaaaatccagcatgtatacttgattaacactctcacagcctaatagaataaaacttcctcaagctgataaaggacatctacaaaaaccctacaattaacatgacacttaataatgaaggtctgaatgcatttcttctaagatcaagaacaagccaagagtatgttctcactactactaatcaatgttattctggagattctagccagggcagtaaggcaagaaaaagcaacaagtatagtaataatactgtcttgatgggcagatgacatgtttgtctatgaagaaaattcaatagaatctttaaagaaactcttgaaactaacaggtgagtttagcaaagctataccctatcaacaaaaaataaaaaattaaaatgaaaaacaatttttaagtagcataaaaatgctaggtacttacagagaaagctgaaaaaaacatatataagacacactaaaatctacaaaataccactcagaaaaaaacttaaaagacttaagtaagtgggggaaaatattggttcatgtgtcagaagaggaaatactttttttttttgagacagagttttgctcttgttgcccaggctgaactggattggtgtgatctcagctcaccacaacctctgcctcccaggttcaagcaattctcctgccttagcctcccgagtagctggaattacaggtatgcaccaccatgcctggctaattttgcatttttagtagagatagggtttcttgatattggtcaggctggtctcgaacccccgacctgaggtgatctgtccacctcagcctcccaaagtgttgggattacaggcatgagccaccgcgtctggcgaggaaatacttttaagtggccaatttctccaaactgatccatagatttagtgcaatccaaactaaattcccagcaggactttttttttttagaaattgacagactgattctaaaattcatatggaatacagacaacctacaaaagcaaaacaactctgaaaagggaatacaaagttggagaaccaacgctacccaatttcaagacataattataaagctacaatactcaaagtagtgtggtactcgcatcaagatagacaaacagataaacagaagagacagagccaaaaaatagacccctttatgaactgatttccaccaaaggtggaaaggcaattcagtaaagaaagaacagtcttttaaagagatgtaattggtaaaattaaatgcctatatatatttttaaaatccttcaatctgtacattaaaccgtatattaatagaaagtttaactcaaaatgtaaaacctaaacctataaaactctagaagaaaacataggagaaaaatccttgtgacctgggcttaggaagaattactaggtataacattagcagcacaatccctaaaagaacaccagacaaattggactccataaaagttaaaaatttccgtttttgaaaactattggaggatttaaagacaaactactgactgggagaaatctttgcaaagcagatacttttgtccagaatatataaagaattctcaaaactcaacaataagaaaacaattcaagaaacattgagcaaaaatttagaacagacacctcaccaaaaaagatatgtaaatgaaaaattagcattttttcagatgctcaacatcactaaccattaggaaaaatgcagattaaaaccataatgataacattacatacttattagaaggactgaaattaaaaagactatgttagtctgttcttgcattgctataaggaaatacctgagactggataatttataatgaagaggtttaattggctcatggttctacaggctgtacaagaagcatggcactggcatctgctcagcttctggggaggactcagcttataatcatggtggacgatgaaaaggagcaggcatctcatatggcagagcaggagcaagggggttgggagaggtgccacacacttttaaaaaaccggatcttgagagaactcagcaccaacctgtgaagttatctgcccccatgatccaatcaccttccacgaggccccacctccaacactggggattacatttcaacatgagatttagaggggacacataccccagctctttaaaagactatactaaatgttgacaagtatgtagcagaacagaatctatcctacagtagtgtgagatcataaaataatagtacttccacttttggcagtttctcagttccttaaatgcatttctatggattgactataattttgggtttgtgtatttattcatgcagcttatgctgtatgtattttggcactctgtaattaggtatataaattttcaggatttttgtgattgacctctttatcattataaaattgacctgtatttttctctgaaatttactttgaacaagactccgtctgcaatcccggcacctcgggaggccgaggctggcggatcactcgcggttaggagctggagaccggcccggccaacacagcgaaaccccgtctccaccaaaaaaatacgaaaaccagtcaggcgtggcggcgcgcacctgcaatcgcaggcactcggcaggctgaggcaggagaatcaggcagggaggttgcagtgagccgagatggcagcagtacagtccagcttcggctcggcatcagagggagaccgtagagggagagggagggggagggggagggggaggagaggatacaccaacttcttaaccttgttagttgtcttatctcctttataaaaatgctttactcttttagatatgctaaccagaattatgccactttctaaaagtggtccctatatggatttattaaaaatattgcatattttcatttcctttgtgcttttatttatatttaaaattgtatcaggaaatcattcatttaggaatagggaagtggcctgtaacatgtggtggctagaacttgcattttggtgctagaactagctggattggactgtgacacttatcaaaccactcactctaaacccttctttgtagtgttgttttaagaattagagcaagtgggccgggcactgtggctcactcctgtaatcccagcactttgagaggccgaggcaagtggattgcttgagaccaggcgttcaagaccagcctggccaacatggtgaaaccccgtctctactaaaaatacaaaaattagctgggcgtggtgacacgtgcctgtaatcccagctactcagaaggctgagacagcagaatcgcttgaacccaggaggtggaggttgcagtgagccgagatggcaccactgtactccagcctaaggctacatagtgagactctgtctcccaaaaaaaaaaaaaaaaaaaaaaagcaagtacatctaggctacttaatatagtattttgcccatagtaggtgcttagttcaatgtagttactgttattatcattttagtattattattctcagtgtttgtcttcttaactactgtatcctcagtgctgtcacagtgcctagcatctacttggtgttcaataaatatttgttgaataaatgtattcatctggcctttaaaatcctggcattagtaagatcataatgttgcataagatatggtgcttactaataagaagaagattccctgataaatagaagcatcttgccttttagaataagtaataggagctcctactgctgtaggagcagtgtgatacagtataaaggatagtaaaccaatgtttgaagctgggtgaccttgagagagttgcttaaaacctctctcagcgttaggtttttttttttttcctttccttttaatctgagcaaaggacaggccagctgatttttcacatattttccagttccaaaaatgtgtaatcgtctgaaaattgagctttgtaggtctataaactatttctatttccatgctttaaaaagaatccaggagtggtggcatgcacctgtaatcccagctacacaagaggctgaggcaggagaattgctttaacctgggaggcggaggcaaaggttgcagtgagccaagattgcgccactgcactccagcctagacgacagtgagactccgtctcaaaaaaaaaaaaaaattctcaatgttaatttttattttaaagcctaagaattagcattttaggccaggtgcggtggctcattcctgtaatcccagcactttgggaggctgaggcaggagaatcacttgaacctggtaggcagaggttacagtgagccgagatcgtgccattgcactccagcctgggcaacaagagcaaaacctcatctcaaaaaaaaaaaaaaaaaattagcatttttgtaaatataaacatatatatatgtgtgtatatatatttatatattttataaatatagatttatacatttatatattgtatatgtgtgtgtgtgnnnnnnnnnnnnnnnnnnnnnnnnnnnnnnnnnnnnnnnnnnnnnnnnnnnnnnnnnnnnnnnnnnnnnnnnnnnnnnnnnnnnnnnnnnnnnnnnnnnnnnnnnnnnnnnnnnnnnnnnnnnnnnnnnnnnnnnnnnnnnnnnnnnnnnnnnnnnnnnnnnnnnnnnnnnnnnnnnnnnnnnnnnnnnnnnnnnnnnnnnnnnnnnnnnnnnnnnnnnnnnnnnnnnnnnnnnnnnnnnnnnnctcggcctcccaagtgctgggattacaggcatgagccaccgcacctggccatcattgtaataaatattttaatataggtttcttaggttttttcttttctgaatttttttaaagataattgctatttagtttttgaaacctttgctaagatgcctgtatttctctcatgtaaagtattttgtatgcatacaaataaatggtaatccagttcactgtatttttttttagttgagattctagtttacttatgtttcttctgaatatctttgctctcaagttcaagtttagttatccaataattgtgacttactctggttaggggtatagtagtgttgagaatctaaatgggagaagtgaatagtaaagttttgtttttaagttagaatgcaactttgtaagacttaaagaaattcaaaggaaagtgaacctgggggaatcataagcagaaagctaagaatattggtatatgggaggaatataaaatatccttattcagttataccgatgtattaaaaattatccaaaactttcagaactgatttactctgtgtttgggattgaccatttatagtcagtaactctgagtcataaaatgagaaagaaacatttagatgaagaatcagataaagaaaaatacctctaacaacataatacagatattgcaacaaggcagaacaaatttgaaattatattgaaattctagtgaagtgagaatccaaagtaatttctagtgaacaaggaatgatgaatgaaatgtagtcttataactgctgttgttattgattgaagatgtggaaaatcaatgctatttttttagaatgctattcaatttgccttattttggtaaatataacaaatattcatgtggtcaataatggtcttaatcttcattaccctatatttcttgtctttcatatgattttattccagaggtttttcaggaacctgatctttcttgtgcagaggatgtttatactgttctaatgtacagtgatagacttagcaatataaaatagaacatagagaaatttctgtccagtaaatttagagaaacaaacttgagttatggtttgtatttaaatcagaaacatctttcttttacacttaataaaacctttcacatcatatttgatatttgacttttgtttttttttttttttctttgagatggagtctcgctctgtcagcaggctggagtgcggtggcgcgatgttggctcactgcaatctccacctccccagttcgagtgattgtcctgcctcagcctccagagtagctggggctataggtgcacaccaccacgcctggctaattttttgtattttagtagagacggggtttcaccatgttggccaggatggtcttaatcttctgacctcatgatctgcccacctcggccccccaaagtgctgggattacaggcgtgagccgctgcgcccagtcgatgtttgacttttgcacctacttaaatgtaatttaagatagaaacacttagtttataataccagttattccaaatggctaaattcctgatgtttaacttgaaagattttgctataaaatggaaaatatgtgttgatatgcaatgaaataatagactacaaggaacaaatgaagagaaagataattattgtataccggctattagcaaggcacattacatacattctcttttaatttaatcttcataacaccctatgtggaaaatatcatggtaacatcagaaagttgagtccttactcactctttaccagtgatggagttaatcaatttacatgtactgtattcttacaaaattacaaatcagatattcagattattttaaggatgagaaaactgaggctcagaagtcaagtaacctatttgagatctcccagtttataaagttaagccaaactagaattccaatcttacagctcaaaatttcatgcttttcctgctattttaaagagctacaaaaatcaagctattttttattattaaaatttgactttatacctaccagcagagagagaggttttagagctttggaaggaatttaaaagatttcatgagttaggaaattcaggcctatgggttataatttacctaatttgtccagttgattgataaatggtaacaatatccaagcattattatattaacttttgcagtactttagttgtttagcagatttttctttgtaagtattttttcttaatatttaaataagtttgtatttcttgaagacacaaacagtaaaggaaagaaactgtaaagcaggtaaagtgggtataggagaaaaatatacattttaagcagattttatacaaagttatagttggacaaccaagagttgatatattgcctttgcttctgttttgcttttataaaaacaaatgaaaatcaacatcctgtctttgaaaagttatttattaggttcctactccctagcaaataagtttacatgacttctggtaaagttatttttcttctagtattagatcctttcttgaaacttgtgtatttacttttagagagattgagaatgacatgtaatgagtgcatgtcccatgcagtaaagatgggacaggaactctgaatgaaagaactgggttttctttatctagccctaggcatttaatttgtggtttcttgccccttcttcactatcttccccattataagatacagaataatgaaataggtttgacctttttgaaatcttatttcagtccctttacaaaaggggtcctgcataaaagatttctcataactagatgaatacatttactgcagttccattttaaagaatgctttggccttgaaacttaaacagattcttatgtaaattactgccattattatgaacactagtgacaatttgtttttaattaaaattaaaccgcattactaagttttcatcataaaagaggatactcataaaaatgtaaactttgagccttaaaaatgcagaggtagcactgtaaagatatgctagaatgcttagaaaatgtgttttgtcaacagctggctgacattcatttctctgtaaatatttagaacatagtattggtgtggtggtttatagaaggatttgcacctatcttctgtgacctgagtttttaatatgagatactgtatttttcaattctagggtgtccatttgctgttttttaaaatagattccagttttcttttgaaattcttcgttttttcatccagctttctactttcttttcttgaacacattaatcatagttttagagtaagttgattattcaaggccgatagccttgttagtggctaagaaaacttgcatgtcatacatatgttatttgtctcaggataatatctgtaaaaaagttcgatttacaaaaatttttcattataaaatcatgaatggccttgaaattaacaacaaatgtatgtaaaatataattgaaatgaaaccattaagattttaaagtgaaaggaagaagggtggatttagtgaagtgactgcattagtcaagaagagaaaggcataaaagtagacaagaaagagaagtaaacagattaaaatgaaacttaaaagacaaaaactgtcagagtttggcatactaggaaataaaaaaggtgaagggcagaggaggaggtgtataaagatttattatctctgttttccagctttgtttagtagatggatactagggccattcctttattcatctcagaataatatctgtaaaatatccataacatatctgtaaaaaagaaaagttcttgacaaaaattctttttttttgagacagagtctcattctgtcacccaggctggagtgcagtggcacactcttggctcactgcaacctccacctcccgggttcaagcagttttcctacctcagtctcccaagtagctggggctacaggtgcacaccaccatgcctggctaatttttgtatttttagtagagttggggtttcaccatgttggccaggctggtctcaaattcctgacctcaagtgatccatccacctccacctcccagtgttgtgattacaggtgtgagccaaacaaaaaaaaacaaaaaaattgtttttttgtgatagtattataatagttctatagcatgatgaaaagaacaggaaattgaaggccatttaatcctggtttcagatccgagctccatcatttcctagtatagatttacatttcttcacctctgtaagctttagttttcatatgtaaaaagaaagtagtccaagccgccatataggcttgttgtgcagattaagtaaggtaataaaagcaagacacaacatgggatcagacccaaagtgaggatccacaaatgctggttccttatctcttcttgtttctccagttgtgttatcatccatcagcaggtgattttcttttacccctttcttcttgttttttaaaacaattcctattttttttttttttttttgagacagggtcttactctgttgcccagggtggagtgcagtgacacgttcactgcagccttgacctcccaggctcgagtgatcctcccacctcagcttcccaagtagctgggaccacatgtgtgcagcaccatcacacctggctgatttttgtaatttttgtagacatgggttttcaccatgttgctcaggctggtctcgaacttctaggctcaagtgatccgcccttctcggtatcccaaagtgctgggatcacaggcgtgagctattgcgcccggcctttaccccttttctacctgttggtcctaagtgtctcatgcatccgtgcgaagagaccaccaaacaggctttgtgtgagcgacaaggctgtttatttcacctgggtgcaggcgggctgagtctgaaaagagagtcagcaaagggtggtgagattatcattagttcttacagattttgggataggcagtggagttaggagcaatgttttgtgggcgggggtggatctcacaaagtacattctcaagggtggggagaattacaaagaaccttcttaagggtgggggagattacaaagtacattgatcagttaaggtggggcagaaacatcacagtggtggaatgtcatcagttaaggctattttcacttcttttgtggatcttcagttgcttcaggccatcctggatgtatatgtgcaggtcacaggggatatgatgtcttagcttgggctcagaggcctgacattcctgtcttcttatattaataagaaaaataccataaaatagtgttgaagtgttggggcagcaaaaattttgggggggcgggtggtatggagacataatggacgatgtttctcagggctgctttgaacgggattaggggcggcgtgggaacctagagtgggagaggttaagttgaaggaagattttgtggtaaggggtgatattgtggggttgttagaagaaacatttgtcatatagaatgattggtgatggcctggatacagttttgtatgaattgagaaactaaacagaagttagaaggtctgaataaaagaaggagaaaaacaggtattaaaggactgagagttgggaggacccaggacatccaattagagagtgcctaagggggttcagcataattacttgcttggttggcgaatttttgggctctatccttgagttttattatgttgtcatataccaggccagattgatttacagaaaaacaacactctttatttaaaaatatacggagtcccctttttttagcagtgagtaagtcagggcctcggtgattttggagaaaaaagaaatgcaaagccagcaattgtttgttaaagaaggattagaaatggctaggagagagtgagtgcgattgatagtgtgatagagatagctggggagaggtagtgggtggcataagaacgggaacaagaataagaatgagtataaaagtaaagaataagacttcatcagggtgaaagtattggagtgtgttctgtcagcaaagatcatctatccactccaagagggaggcaagagtggtggattggggatagattttcacgatggaaaggaaatgagaggttttaagagatgggctagcggcttgtaacctacatggaagaggttatgaaatgacgacagaatagaatgggcctgtgaggctggaaggagatattttccttggtccaagaaccatttgccttgtgtaggaagacattgataggtggaagttttagtggcagagtaggtgggagtgactgacgagaaggagaaaaactggccatgaggggcagaagttggaacgctagctgcttgtttagctaccttatcagcataagcgttgccctgaacgatgagatctgacaccttttgatggcccttgcttgcagtgaatgactccagcttcctttggaagtaaagcggccttgagaagagtttttattaaagaggaattaatgatggaggacccttgcacagtgaggaaacctctttcagcccatataacagcacggtggtgcaggatatggaaggcatatttcgagtcagtatagatattgatgcgtagtccttttgcaagagtgagggctcaggttaaggcatgagttcgccttgctgagaggtagtggagaggggcagagcggtagcctcaatgatagatgtggaagatactatagcatagcctgcctttgttggtgagtggcgattaggcctggtggaactgccatcaataaactgagtgtgatcaggatggggaagaggaaagaaggaaatatggggaaatggagtgaatgtcaagtggatcagagagatacagtcatgggggtcaggtgtggtatccagaataatgtgggaggccagattgaagtccaggccagaaacagtggtaattgtgggagacccaaagagtgagtatagctgaaggagccggggagcagaaagtatatgcatcaggtgggaggaagaaaatagattttggaagttatgagaactgtagagagtgagttgagcatagtttgtgatttttagggcctctaaaagtattagagcggcggcagcctctgcacggagacatgatggccagcctaaaatagtaaggtcaagttgtttggacagaaaggctacagggcacggttccggctcttgtgtaagaattttgaccgcagagcccagtactttggctgtgtgtaatgaaaagggttgggatgagttagggagagctagcgtggtggcagcttctagggctgtttttaaggaatggaaagaggagtggcgaaaggaattaggatctatggggtcagctaggtttgctaggacagaataatgggttgtggagggaggtattgaggatagagtatatgggtttggcaccacagggtggctaggcaagacaatttggttgctaaggcacagatcctgaactaacctataagacttgtcaggtttttgacaaggtaaaatgggggaattgtaaggagagtttataggctttaaaaggccatgctgtaacaggcaagtgataacaggctttaatccttttaaatcgtgctgtgggatgggatattggcattgagcggggtaagggtgattaggttttaatgggatggtaaggggcatgtgatcggttgctagggagggagtagaggtgtcccgtacctgtgcgttaaggtggagggatacaagaggaagatgtgaaggaggctttgggttgggaagaagggtggcaatgaggtgtggctgtagcttaggaatagtcagggaagcagataatttagttaaaatgtcttgatctaataagggagctgggcaggtggggataactaaaaaggagtgcataaaagaatgttgtccaagctggcatcagagttggggagttttaagaggtttagaagcctggccatcaatacccacaacagttatgggggcaagggaaacaggtcgttgaaaataaggtaatgtggagtgggtagcctccatattaatttagaaggagacggacttaccctccactgtaagagttacccagagcgtctgtgatggtccaggaagcttctgaggcgatcgggcagcgtcggtcttcagccactaagctgagaagatctgggaagaagtcagtcagagagccttgggccagagttccaggggctctgggagtggctgccgggcgagttggacagtctgatatccagtagggtcctgtacaaatgggacacggctaaggaggaatcccgggctgcaggtcattccttggctcagtggccagatttctggcacttgaagcaagctcctggggaagaggttctggaggaacccctggcagctgcacttcaggtgtttggagttcttgtgtgctggcaatgtagctggggtttgtctcacagtggaggcaaggaactggaacttagaaatacattgctacttggctgcctctactctattattgtacaccttgaaggcgaggttaattaagtcctcttgtggggtttgagggccagaatctaatttctggagctttttttaatgttgggagtgggctggttaataaaatgtatattgagaataagacagccttctggcccctgtgggtctagggcagtaaaacgtcaaagggttgttgccaaacgggccatggactgggctgcgtttttatatttgatgaaaaagagcctaaacgctaactgatttgggagaggtcggataaagaaaaaggaacattaaccttgactatgccttcagctccagtcacctttttaagaggaaattgttgggcaggtgggggagggctagtcgcggaatgaaactgtaagccagaatgggtgtgaggggagttgataaaaagattatagggtcggggagcagaggctgaggaagaattgggacctggctcagcctgttgaggagcagcctggggaggagaggtcatatgggtctgtagaaaaggaggattcaaaggactcagagcttggtgtggagactgaaggaacagacaggagagaaagaagaaagatttgggatgagtcgcattgggagcagagactagggagggaccaatgtgtaaaagaatgcctggatgtcaggcacctcagaccatttgcccatttttcgacaaaaattatctagatcttgtaaaatggattttctggctatttagaaccattatcgagtttgtattggggtcaagcggtattgcagaagaaaataaggcatttaggttttaggtcaggtgtgagttgaaggggttttaagttcttgagaacacaggctaagggagaagaagggggaatggagggtggaaggttgcccatagtgaagaaggtaagtttaaagagaaaggtagagacacggagaagcggggtggtggggagcagccctgggctgcagtgtgggtgaggagccaaagcaggcatccccgcaattgacttgccaccatgggaatgtgggtgaatgaccaaggcaggcgtccctgcagtgatcagacaccagtgaattgtgggtgaataatcaggcaggcgtctctgcaatgattaaacaccaagggaaggctgtcttcccgagtctgtgactggcgccagagttttgggtccatggataaaatgtgtctcctttgtctctactagagaggaaaaagaactggaattggaagggcagggagattgaagggtagcgagagaggctggagaagagagtgaaaagaccgcttacccgatttgaaattggtgagatgttccttgggctggttggtctgaggaccgaggttgtatgttgatctcctcatggagtgaggcgaggacaggggactggtcttccgaaggagtccctctgacccgggtcttcagcaccaaatgtctcacgcgtcagtgtgaagagaccaccaaacaaactttgtgtgagcaagaaggctgtttatttcacctgggtgcaggcgggctgagtccaaaaagagagtcagcaaaaggtggtgggattatcattagttcttacaggttttgggataggcggtggagttaggagtggtgttttgtggcagggggtggatctaacaaagtacattctcaagggtggggagaaatacaaagaaccttcttaagggtgggggcgattacaaagcacgttgatcagttaaggtggggcagaaacaaatcacagtggtggagtatcatcagttaaggttattttcacttcttttgtggatcttcagttgcttcaggccatctggatgtatacgtgcaggtcacaggggatatgatggcttagcttgggctcagaggcctgacagtaagcactgattctttcttttgtaattacatatatttttaaaaattcctgatagccgtactttttattttatttgcatagtgaaattcctttgtcttatgaacagtttttctaatattctgtggtcagttgaaactatatttattaatttttatctcttaattttttggataatttttttttaacaataatagtgacatatttgctgcccaaattcaaggagacccttcctgcaccctgccccaacccaagcgcatttttatttgactagattattgaaaccaaaagaaccctttgagaccgagtgggatgattgcttagtggaaataggtcaggcagaagatgggtcagatggggacctcaaaacttaattttagttttttaaaatgttagtattttctgaaatggtactcagagttagtagataaccccctttaaattgtgcatgtttgtgtacatgtttctttttttctgcagagagagaatccctatctttcataattcataaccagtataacctaaacaagttaatattctctcactagcctagatcgtaaacttgatgaaattctgtttaagattagcacctattaagacactgctcagtactagaggatatttttgattcacaaaattttagcaattttttttagcgtatttctatctaaaaatattacttttaacaaatagcacatgatacttcagtgggtgttttaatatatctagattatttaaaagttaatgttcatattaaaattttaaaaggtgctttaatgtacaggaaaggaatttgtttaaaaatccttttgagaaatcatattctagttttttttttgttttttggtgaatctaggcttttcacgtagcataatactgtgatataattatttaattttctgcacatcactggaatataaaatttcatattaatccagaatgagcagaagtgaataatataatttcctcttaagttctcttatgttaaaataattcattttaaattatatatggtttctccctaataacttacagctaaagacattgttttacttaacaaattcaatttacacagatgtctaaagatgaatagcattcttatttgaaaaatataagttaaaaacaagattatgaatatattcaaaacattttagttaaaggttaattaatgcattatagatttaagagtttaaaatttaagtagggaattgaacatttgaaattttgctttcccattttgtgatggtatgaataaatccaattcaaatacattttaattataggtttaaataggtgaacttttataaatagttattagtgagtattctgtacattttattagcatatcatagcatatttttgttctaaagactgataatactattttattgggaaatattaagataaactttgttacagtttctacacttaacattttttttctttagctctcaatactctaaaatttatgagatttccattggttttattagtaatgtctagaaaaccacttctttgtaaaaccatgttttcaaacaattgattgtgattaaatgagtcattgggaattaggaaactcttaagtaaccagtggtggcaaagtaggagattaataccttaaagattttctaaatggctctttgctgtcctggaagactaatttatatctaatggcatttaatttgtttatagggaataatattaataatttattcctaagaaagttacagtatttaggaaaaattacaaaaatacataataattcaaatttgaattttcaggaaatcttagttttctattgcagtaattgagtttgtctaggtgtatgtgtgctttgctgttataagcttactttagatgcttctttggaaggtatgtcttatttgggtatgtcttatctaatattgctgattaatcattaccatattagccattttatgaattactgaggcccttttagttctctttccgttttcatgtttttcctattttcacaattctaccaaaaatctaaaagggaccaaaggcaatataaatagaagccaaaatttctattcttatgttactactacttgttgctcaacttaagtctgtttaatacctattcagtaattgaaatgatattttttaaatctcctgttaatttttactttcacaaagctgaatggctgtattaaaactagttcaccaatgagaaaaatataaccactaaggtgtggaaatgaagaaatgtgtgttttgtttttgtttttgtttttgtttttttaaagaaaaagggttatttaaagtgagctgagggagatgggtgggatccagatgcttggagctgtctacttccagaccaggttagtaacatgacgccattcacacaaaaaagttgtttttcctgcatattgtgagttggtggtcttggtccttttaattaaagataagaatacttgataaaattacatttcttgttgatcatcttttgcagaaagacggagaattacattggtaaagaaccgctaacctgtcccctcacccccagggtgtgagcagtgaaaaggattaaggcccactgtagggaagcttacactaaagcctgcactgccccttcccctgttctttcagctaaatagatttttagttcccatgactatcaatctggtgcttttcacaagcactaaattctcttaaagaaaattaaagatgacttatttttttagaaactggcctggaatactgaaagatggtgttttttggtactttgtttcatgttgacagatcccatacatatttttttctgatgcatgttaatttgcttcagcttgttttgaatttggagttgaaataaacatttaaaaaccaaggacaggttgttatatgattagatttgcttgtccacagttagcaagtgtagagttcgacactgttgaatcttacatttcattagaaatagctacctgacagccttgtggacataaactctttaacttttatctagatgactacaattataaagtgctttcttttaaaagcttttaagtagcttttataaatgctgaagtgtcattttttttagtatctgccaaattggtattgtatttaatcttgaaaatatattttgattttcttaactaacaataattgcatagtattaaacattctcagtagctcaaccttttttttttctatttaatttgagcttttgttgttactaacaaataatttgtggcacagtttctttccttttttttttaaatgactgctagaatctatatacttgtcaccttagtgtgctagaaatgttccactcaaatcaagggttcctttctggttttgtatgttctcacctgctcctcactgtaaatcattgagatgtcaagtgcaatgattaattaagctgcacgtgcaagtgctttttttttcacctgtcaagcaggaaagaagtcttatagcaaaattagatggtgctaattcacagcttttacttcagactgtgaagtgtgtagaaatattttatatttatatgcttattcagaatgtggcatatcagggcttgtttgttttctaattcttaaatattgtaagatacaattattataccaagccctatcattaaactcctaattataaacagagaagaaattcagaattcctacttaaatattttggaattcaagatttatactttgtaattatcttttattcaaatactagtagttgatttaagttaaagtaaatatttttaagttttaaaattgtgtgtatgtatgtgtctatatatcataatgagatctattcttattatagcatgggtttaaacttctgatgaaatgatggtggtaactacatttttttctttaagtaataagtatttgcagaatgtagtattaagcttttgggtactattttatacattaatataaaacagtgggcttggaaaacttgttctgctctagttctttcatcatccacccacccccaaaatcatcagtaaaagtaaaacctcaaattgtatagtaatcttaatctattattaaaaggccctagaaagaaagattacaaggtagattcaggttttgaatcggttttgccattggtttagcagcgggtgggcaggcagatgcctgctcagagtagaacctattgccatttttcaccattgatagagtagcctttcagagtcaatgagctctgtcaatgtgagcttgtcaaggctacaacttcatagacctgagaggcggtttgagaggtcagcccttttcaggttcgctgtgatgcaaatgaactttaatgcttaaacaactattggaatttttatgtctgctccttgttcttttttcttcacaaagtcattgacgagacattcagtgctttttaaattggaagttgcattgtgctaaagacctagtacagatttacggagggctgaaagcagttagatcatgttcttttcatggtgcgattagaatcaaatcgatttccctacagccttcagcattcagatggcaattttaacaaagcttgggggctagacaagggacaaaacgaccgaactgaatgttaattacactctgcagccttattttcttttgatttggggctgactggcaactaaattaacaaaaagtgtgaccataactgctgccctattttcatttaaaaggagagctgcctctaaaaggctatctttacaaagaaacaagtgaggtctgctgatcattgttaacaagggcacttttttttctttaaaattcttgccaaaaagactcttcagaaaaagtaatgtaataaattagtcattggcatattattacccagggaagtagttgattttccgatttttatgacataagcttggaaaatgtaaggcagtagtcgtaattcattggtagttatgaattataattggcatctatgtgactttggtgtgtctttagcatgtttaatatgctaaaaggtaatgtaactatttaaagtagatactttaaatacatattaaaattttattatgtaacattaaactgttcaaacccagcttgatcctaacagtttttcacctagctaatccttgcttgacacgcaaattttcatatttgattactagtacttctttataccacattaatagtggtaagatgtttttttctttctcttgcaagaaaagtgcagctgaaccaagttgcaagttgatcctggtggcaacactgtcatttttgcacctgcagctgtgtcagtctcatcctaacacctggcaccatgaattaccctcttttattcatattctcaagcaagaaacatttcatgcagcatagcatatcttgcaaaaatcaactgaagtaaattctcagttgattcctgaaacagtagtattgaattaagagtttgattttactatcagatgacacttttatgttggtttaaataaaattttggctctgttcaaaaaatctattggtagaataatcagtaagctggcttttaaatatgggcattattttaagcatgatgtgaaaattaatttgattttataactcattgatttttttaatattccaattttttgttttggaacttactgaaaggccatttgcattttgttaactaatatttacttttgttttaaaatatgtattaaggaacttccgttactatttaagtattggaaacatttttgaaagaagtgggaatttaattttatttggcagatgacattagctttttaaaccttgatagttttaaatcagaggctagtaaaaaaagattcgtatgataaaaataaaggcatatcttttttaagaaagagtactcttttgtgttcaggttaccatttagtgcttagaacatcgatagtgatgcacaccacactatactcagtcactgtcttatacctctccccttttcacagaaaaagcagctgcaaaacaaagttttctaaaaccagtcaagagtaaacttttttctcatttgtcttccagacacgaagatcgattgagaagttattagaatgggaaaacaataggttataccacaaggtgagtaccacagggagcagcttcgtactgttggggtctgaattgcacagtatggaaacagatgcttttgttgaactaaaaatatgaaaggtggacaaatgggttagtctgtgtgctgcaataaaatagagctcatttttcttcttttactttcctacttgtctagctgtgcttgcattggagactgagcaaaaggaaatgtgaaacgaataacatgatggaatatgtaagttaaagggctgttttgtgagtttctctattaaatgatcatttattttgcttctgatcttattctttccatgattattaatcagcaaaggtgtcaggagcttaatctcctgagtgcaaggattttctacggttcacagatgcatggtttcatgtgcaagactgatttataaagttatgaatgacttgaaaacaaggcttcactgtgttctgaaaaataataaattaattgccaagataaaatagcctgaacatgtgttgatggagtgtgaaattttagatgctgtataaagaataaccacaactttggttacgcagcaagtcagatatggcttttttatataatgctaatcaagtttccaagtatggaagaaaacctttcagccaagccattggagcttaagaaacctttaccctttatagattttaactgcccgtacctcagtgccctttaaagaatctcttttaaagtgttattagaatactgctttgtaaaaattaaaagtaagcaggagatgagatgttgatcatcttgtgtttacttgttaaaaaatatctaatttggcatatatatacaatgaattttagaacttactcagcatgggatttaatttactgactccatgatttacttgaacagtttttctccttttgaaaatttcagaatactctagaaaattaagaattttaattctcttttgagcttggatattttattttaaatatggccaggttattactttaaaagaaaagatctaaggaaaagttaatagttgaaaataaaactcagagcctttgtgaagtacctgttacaacatttctgaggaattttgtctattctttaaaacaatatagccatcatagatgtgtgcgtgtgtatgtgtaaaatattgattaaaacagtgtttagttgtaaattatcataaaatcatttttgtctgttagcattttcctgttctttcattatcccacagtcaaatcctatttctagccttgaacataaaaaatatttttaaaatgtcttagactagctttattcaatgaaccaaataatgtagattttatctttactacatcaaacatgttaatgtatgatgatgagaaagacacttgatacttctttataatcataacacatttgagtaactcattttgaggtgaggagactagtcttgtattttcatcttagatagagggtttatgtatatattttggggagagggatggataggagatgtaaagaatttagtgaaaaaaatatttactacatttataacacaaacactaagcttaaaactgaggtattaattttttcatgcatttctaaatttactttggaaaggaaaacataaaagttatcccaatgctatgaattccagatagaactatatgactataatttattcataaaataatttataaccttccaaaacattctgaactatatgctttgtttgtcaaataagtttccttgaatttttagataattaagcacttctgctaaagccattatattattttcactccatcatagaagatacccagaagagtagtaaagataaaataaatatttcaattgccaggaaaaagctgggtgtagtgggcatgccagtagtctagctggggaggctgaggcagcaggatcacttgcgtctaggagtacaaagacagtttgggtaacatagcaatacccacctctctttaaaaaaaaaaataataagctggggagaaaaaatgtgttctgctggattttcttagagtatatatatatatttgtgatagttgaaagtgagaataatgtagcttaaaaaatttataaaaatgaattttaaaagttaaactagcaaataaaattcattttatctaatgaatttgggcctttttaaccatgtgtccctcttttcttcaacttttctttaacttacaggaatttaattttgttaaaagaaaataattatccttgattataatttgaacattggagatactaaaaaatatatatatatatattccaccttggcactaacttttctttgttcagatatggtagagatggatgatttagaataaatgagacaagtggccagtctctatgtgtggcttctgaaggaaaaatttgtagaatatattatttaaaaactaatagttcaaatgtaggcaaagatagcctttattttatgttatgtattaaaagtgtatattataaagtgtggggatgcccatacctggggactaaaattataaagactgattgaggacatacttgaaatacaaaattatttatttaatgttgactcctaagtagtttaaacatttaattgtcaaattttaaagctgcaaagaatcttgttatctagttcaatgcttttattttatagataagaaacctgagaaacaggaaaatctagctcaaatgaagaagctagttgggagaaagtattttaacagggagctagtgaatattttgtaggcaaatcacaggtcaggagagtggcaaatgtgacagctaagccttagtgcaggatacctagagtaggacaggaatatttttgagccaggtatagaagtgtatcttctttattgaggcagatcaaaagccaggagaactgaagagtgaaaatgaagattcctggcccagacagctaatttgtagaagtattgaaatctggaggtcatatcaagcaagacacagtttctgaaaaagaatgatgagttcactagacttagaaacttttaaaatcaaataatttttaaatcaccatctatttaatacaaatttggagcaaaagaaagagttgactgtaatttaagaaaattcaaatttggaaaaattagctctggtcactttgtgtaattctgtgttaccatattttgtttttgttggttttcctttagtttcctattaaaaggccttttggaacaaattttagcctttaattttgctaacctaagaagaaatggactttttaaaaaattaagagataaaggaccttttatctaaagattacatattctggtagagtaaaatgagagcaactctagaacttagagaagactcatgtagttgggttgattaaaaaggagaaagtctaaagaaaaatgttgggtgagctgcagtcacgtagggtggtataaagggcaaggctttggagttaagacagtcttttattcaaacagtgactccacattcaattgtgatacaacttctctggatcatcagtttcctcatctgtgaaataaggattataatacttgcctcatagaaaagttgttgggtttaaagagacccaatgtagtatggaacacctggtatacagttagttctaagtaaatactagcctcttttctcatgagtgcaggggagcgtgcatgtatgcatgtttgctcctccagtgtatcaggggcactatctatatcacccttctcagactttggtgattttacttgcttatttgtcttccttttcatagagccaaggtatttcgtgtatttggtaaaggtccagaaataaaaagaaaaattctcagtgatggaactctgcattatcagataaagatctgttttagtaatgcaaagttgcgttttaaaatgtgaatggattttcaaaaaaattgtgaaagcatataattgaagttttaagaaaaaattttgtttaaatcttttaaaacctttttcttctccttttacaggtcatcctcatagaatttttaccaaagacaccgatttttcgaccagattagcatttactttatttatagagactttccaagtatgttgtctttccaatggtgccttgcttggtgctctcctggtggtgacataacattggttctacagaatcgtgtggtgttttttttgtttttgtttttttttttttttaaataaccgcatgttctaagtgtgcatttttgtcaatctttgcaacagttatttcatacagatgtttaatacttaagttattgtgctcttttctgttatgtattctgattttcaaggattacttttttgtattatcaaaaaaatacatttgaacttagcataaaaagtggccagccttttttattttgtcaccaaggtacacacagtcctttatttataaattccttaacagagaaaaacacctttgtaaggctcaacttacctattccagcaagcacactttttctgtcattttttctttcttttcaaatttgatattgtcattattttaaaatagtaagttttctttaatagtcttttgggacctaacataccctttctcatacaattcctaatgctctgtttatggcagataatctgtaatgttatgaagacctatcaaaaagttttaaaagtatttctgtcttcaaaggtagtaagacaggattaaatttttattagaatagacaaatcagtgaatggtatgcatgtatctagtggttactagaactcaggatcacacaatatagtagcatcacgatctgtgtatatttttgatcaagatgataataatggccttacttgggtttttatcgtttatcaaatcttacatacaaaagagtggaagtattcctttacaaaatttctaaggaaaatatttcttccaatctatcacaattatagaatggatatatgtttctgaaaagtttttgaaagaaagcaaaagttctagaactaaaagtaagctggtatttaatatcccgttgatatttagaaaagattgttaataagaaatggaggatgcatttagtactatttttatccactagttcactttcagtacagttatgtatacttgttttgattgagagtgtgacatacatgttaaatcagattagcttgtttcttttaaatatacatatacacaaatacatataattttttctcctttttgttgtgcatatctctatgcatttttaaacttttagatttgtgaatgacctatgtgtaaatttttgtttttataaaccagaaattatacaagttttaatgtgtgtcaacaacttgttccatacaactgtggtatcgagcaataatgttaataacttttggaattatataaactatgcttaataatttgtattgagaattggtaccactatacaatacttttttcctgtattaaatcttttaaataccagtttcattaatttatatacctgtatttttaaaagtatttctttgtacttgccaaagtactgtaatcctatataaatttgaatagtcaaatgccagtatctcatgtcctatatcctgtcttggatattaggagctatcttaaaaactaggatttaagatttttttttgcttgagaattatatgttttccttgccccccaagtaacaacttgaatttgtagaacacttttcctgtgaagagttcaaagtacaaagaactcaaatacttattttatttaacttgtatctagggtgtgtcctaccaccttaaagtagtgcaattaaaaataatgccatctagaaacttcagtattcctctgtggtttcagtgtgaaaaataattgtatcttcatacaacgctaaatctgcctcaggattcagaaagatcagaaaaatataatgactgtgtaaactatgcaacacagtgttccctgtataaaattgtataaatccatagagcaccatattgataagctttatgagaagaacttatctatttacataatttattctcctgttattagtctactgtggataataattttaaaattactatattcccttagggatattttaactgtaagataattttcatggttgattatattaagtatagaatctttaaaagcttttctgattttattcagccatgtgccatttgcttaaagattccctagaaacatacacttcaatgtatatatagaaaataactgtgaatacttaatatgtggtattataagccagttatgccttgggcatttagattttcatgcttggattttcattagtaacctgtagtataactgtatcctttcttgaaccatgaatttaagtgcccacattactggatagtagagatgcccatattaagtaaacatcagtctaaggaaatatttaaagtgatgatttttcttcagcttctgttttctgacttaaagtttgtgggacataaactgtagagctttttaaactggccaagaaaaaatattattggcagaaagtttggtatatggattctacataggctaaggtaaataacttatggtctttttaaaatacattactggcattttacaatcagtcaccatttctgtatagaaacattcttttctcaacaaatgtacgttgacaaccctgttatattttaatatataactctggctatctgggttaaaatgatactccaaagcctaatgactatagtaaaactgatgtgacacatttagcttctaaggtagatgttggccctcccttacatggagatcaccttacctatctaaaatgatcatcagatgctttattaagactctttaatgactagatttcatttatttaaaatataaacatgtcattttgccctaaattcaacaaaataaattcaacaaagccttgaataatagtaaacaatgattattttttcttatgagaaaaactagttttgtaattgaataattttaaatcaggaagaatccagctttccccaaggttttgtctttagtgttattttttcagtgttagagagcttctggttgtttctttatattaatagacgcaggccaaccataaaaatctttgacaatattctgtctctatctttggatgtaaaaggacattaaatagtaatacgtacagttggacccacagttgcatgagttcaaactactagttttgtataacactgtgtacatagtcagactgtttcaacttttgtggtatttagcttcacaattataacctttaactgcatgcttgatgtttcactgtaaatatttgctttgacttgctgttaatcagtagtactaaatcaaaactatagtgtgttaaagctgtcttggactgaactccagcatctagtcctgcaccctctttctttttatccttttggacaccatggattcttttgctgtcctcctgatgtccagagtctttacctaggcctgaacatagttcagaattgcatttttatctttcttcctcaaagctcccagtaagaacagtaatttttttttttttttttttgagacagtctcactctgttgtccaggctggagtgcagtggcaccatcttggctgactgcaacctccacctcctaggttcaagcaattctctgcctcagcctcccgagtaactggtattacagacgcccgccaccacgcccggctattttttttgtattttagtagagacgaggtttcaccgtgttgcccaggctggtctcgaactcctgtgctcaagcaatctgcccacctcggcctcccaaaataagaacagtaattcttttgtattcttaggtaggtgtttagaagaccaattaaagtaagtcgcattaagtgatgaatggctgacaccctcagttctgctaaggtggtacttgcattttaaaaatgcattttaaaaagagatttcttaattgatgcagtggtgcaattgatgtttccttctgaaaagaccctaatggtccacgctttctagggagggaacaataggatggttggacatggggttgcttctcaaacctgtttttgaaagaaggtgattaataattagtttttgggaggaaagaataggctaattttaaaccaaactattaattatcccatagccgtttgtgtttatttaaccttttcttaaataaagtaactcttaatttttccttgatatcatggccaactttatgttgtttttaggaatatatcttgagatttgaagaatgtctttaaatcttgaggtatcttgttctgcacttctatggagatctttagataataattaagagaagcctaaatattattggtattattaatcataattctatctgtttctgtaatatggagcattatctcccccacccaatggcatattgaactaacagaggttgtttataatcttaataggtagtactgaaaacagaaattcaggatgttgatcctgatttggaactcatttctggtattctacaagatcatccagctacttggcctttttggtttcattttcatttcccaagcagggagatactatgactacctcatggtgttatcttgtgaagcaatatttttcgatagtttattttcctgttattaagtcctatataaaagtaagtagttagatgtttaataataatgattgaataggtttttcaatttatttacaaagtcagcgcaaacttgaattattgtcaggttttgcatttaaagtggaagagattgggtattccctatatatacttataatgctttgcatgtttaaaaatcagggaaacattaaatatagtactttgaagaaagtttctaataagatttttaaaaatatagttacgtctgagatacttaaacaaaatcatgcctttttttatatcccctctatttcatagacatggtgctctgatattgagttgattacttttttctctttatgaaaaccagtatattgctttcctagctctttatcttagaaagtattttgatgaagtgaccatacccggtatccttaattttggcaaataagctgtatattgctctgttgttgtttatttaaagaaacatagtgttaagcagccttcaagagacataagtgatgggtcagtgttttgtctactctactttattgagacataacgtaccctcagactgcagagtttctatcctattgtgtcttctactggttcttgatgtagtataactggttccatttctttttcttggcataaattctgtatagatttaaaatattgtagaaggaaagagtatttcctcaagaaaccttttgctctaaattaaagaactcctcttcctttagtagcagctatttaattaggtaattagaacaatctcattacatggccaccaagtctttataaacaggagcttgtttaacgcaagtatcaaagcacttttaaattctgtatttctttttatgtttgttgaggttattagcattatgccctctcagaagggtaaagtattgtgaaacttaccggttgtggcagtagaagcaaggcaaacatgattggaaggcaaaatgctgaaatctactggctgagagaaataactgcattattatcctactctttggtttacaagggtgaatgttatgcattggtcaggaattgcacacagctttttgctttctttatacattctttatatattacaatggaaattatttttaaagaaaaagaaaaaatattattctagatagaattttcctttatcatcatgtcttttgagaagataatgggaggctaccttgaaacaaatatacttagatttattttttataatataaatgtgaccattaaaaaaaaaaaaagggttccaggaatttgttccttcatcttttttttttttttttgccactaatgtaatttatatccttaaatgaacatggaatagttttcatataagataatcagaaatttctgatggtgagcacttatgtagaactaagagcagggtccctaaaaatatgctttcagataattatacagcattcaggtaagtctagtaacattagaaaatgaagataactggtaaaatataaagttgaatgtaaaagttatgtattatgtttttactttcattattaagatattaatcccactgccaaataaacacggttttttttctttttttgagacagagtctcactctgtcgcccaggctggagtgcagtggcatgattttggctcactgcagcctctgcctcccaggttcaagcaattctcctgcctcagcctcgcaagtgtctgggattacaggcgtgagccaccaagcccagctaatttttgcatttttagtagagagcattttgtcatgttggccagactggtctcaaactcctgacctcaggtgatccgcccacctcagcctcccaaactgctggggttacaggtgtgagccaccacaccctgcctatttttcttaaaatgagattgttttgttagataaaaacttgttggccttcataattatgaagaaatacataatgggttatatttaaggtggcttagtttttggtcctgtgttggttgtagtatatttagtcttgtaaaattaagtcttcattgattgtattgattgttctttttttagtaaacaaatggagactaatttgagctagggatttttttttttccccagttttggcttgctttggctagttgagttttgttgcttttaagtgagtctactacaacatgtcatttcaacacaccattccatattcaaaactaaaatatgggctaattcacagcattttgtctttaaagaatataatatattaaataagatcgtaagccagtgtatttggaattggaaaagggaatctggaacttagatcaaatcactttaaaggaaattggccaaactaataatgtctgttaaaatgaccatatgaatgaatgcgtacacgcacacacacctgcttctgtagatttgacctgtacaatgtgtggggaaaaactaattaaattgacgtcattatgaatatgagtttagaaactgtgtacaatgaatttaaataaagttttatgttatatgttcatggacttacatcatagttggaaaaaagaataggggaaaaatgtagcttatataatataatattaccttttttttccccacagtggtgttttagttatcccttaagtttaaaattaatgcagcttgtaaataggattctcaattatcccgtttcagtttttaaactttcagtaggaggcagaaataattccagttgccacttctgtaaatagacgtttagcactatttgaaatagcttatctgtggcattgtatcaagtgactatttgtaatacaaatttttcattttactcaattgacccagattccagtctaaacctttactaatatagatccatatatggaaatacacatacacatacacacgcagaatctcagtacactaagacatctctttgcagtagacagtaaaggtaactccatcacctggattgtttcagttaaaatacaaaatgacagttgattctatatgaaacataaaaactaaagggaagttttgtgagttagtcttgtttccttgagtcatcatactgtagtttttaaagaattgataacttattttctgaatttttattattttattcacatttttcatcctgaccagaaaaacgtgagcattctcagaagtgacttgtttcttttttcacaaagagagacctatgcaaaaaatgccattgctgcttgcactagttactatcttagaatccatcacagaaagcccaaaagatagcacaaccttttgtacctacagtcttagatattgttagatagccattcagttttgtttgcattgtgtatgagatgaatatttcttgagacttttttgtttgctctactaaagaaatcaaccaagggaaaaaaaatccaaaaaacaaaacaaacaaaaaacaccctctaactcatgtgaagcatgcagggtgttgtaatttcagtttgcaaagcggtgtgatacaatgttgctgagccaaaagcacacgatagatttaatgtagccaattgtgtacttttgaaaaaaagagtaactgttccctgtgagttaattttggatttcttcaaaatctctcttttaggctttgtgctggattcttccagacaaatgcgtattccatgtgggccactgttctgctaaatgctctcagttctccttttgcaatcaagattatgttgctaaggagattttgcttttattgctgccattgatttgtgttaatacgttttgaatacctctcggtattctttcgtagacaaggccaaaagaaaaacttccccgagtttcccaatttacattacaaatggagcggtggtgtaatgaagccgatataaagtgggcagttgaaaggagactaaagaagggcactcaagtgagaaatgaagaaatgtgccgagtgcagtctgtgggctgcccttggtccagctgcaggaactggctctggccagaggtagagtgagtgagcacctccctctgcaaagaccacccacttttggagcctaggctggcacaccaaagattacctcattgattaatacagggcttgaaaatttctgaggtggcaaaatcacttctaaatctcttttttgagtccttcctagagcatgactgaggccacacttcctgtgccttatgacctgaagttgtaaaggataacctatggatggaccagttcttttggttctgaggactagtgtatttcaaatgttggaatgtattcctaggtgaggaggctattaactagattaaattggttttagttatatgcttcttactttgtgtcatattttagactccaaaaactgtcttcctaccaaaaaaacccaagtattccatctgtgagtggaaagagaccaactagatgtgtctttaaccagcgaagtggtttgctcaggttgcagtgcgtggaggtgctaaagaatagcatgggccgggcgcagtggctcctgtaatccttgcactttgggaggccgaggcaggtggatcgcaaggtcaggagattgagaccatcctggctaacatggtgaaaccccgtctgtactaaaaaacaaaaaattagccgggcgtggtggcgggcgcctgtagtcccagctacttgggaggctgaggcaggagaatggtgtgaacctgggaggcggagcttgcggtgagtcgagatcacgccactgcactccagcatgggcaacagagcaagactctgtgtcaaaaaaaaaaaaaaaaaagaataccatggtagcacagtcataccctttaatggctcacattgttcaaacagcatgatattaacttttttttaaaatcaaagcacaaatgcttcatgcatataacttaaagagttttagatattttaagttagaaatgccaaaaatataaaaaccatgaagaaaaatttctatagaagttaggaaattaaaaatcgatcataagggaagcatctcaggtttttattgcagtatttggagatgaaaaatgactttctattgacacgatttgttatttcagcaaaatagaagtctgtcagtctaatgttggatgatctgatagtctttgcaagaaataattgcagagagtttctgcaatcactgggaaatagaaatctataaaaacatctgaaaaagtgtgagactgggccactgcctagggggatagccctgttatttctatggaacaggaaaaaaaaaaaaaaaactctgaaaaggaaattcttaattcctgtatttacagtgcctttttcagtaggtttttcctgcaaagggtgcttgtcagttactttgctttaatggataaaatctcaatttccaggccaaatgtaactttttttggtcttacatcttgatttacttgtacttaagaggttttttctccctgtaatatttttaaagcttttaaaattaacttcagcttaaagacaatataagtatgaatttctgtttccagccttgtagttctgactgtatttgtcaatggtttctatattaacgatagcattgttccattgtgtaatcctaaagttaaaaattctaagaatgagaaaaacagctatgaataaattataagtgaaagatagaaaaaacacatatttctatactaaatattgagagctttgtatttttcaagttggaatcaatatattgagaactgactttaaattttaaaactcttatgctgagaaaccctgacaggtaggtaaacccgtttgtctacataagatgttagcagtgtagtattgtgcacatcaagcatgttacaaaaactctaagttattctctgaagatacataagttttactagagatactctggatttattagtcctgcaaagccagctttttatagtc

SEQ ID NO: 970 - DNA, 1032 bp, Homo sapiens
tgtcggcctctgggcggatgttgacattgtgttgttgttattgctgatggtaatggcggcggcggtggcggcgacggtccagaccccatcccctctgtagccggagccgagacagccgacagcgaactccgcggcctcggagccggcggcagcggcgactcccctcagcctccgccgcctcgcccgccggtaccccggcgccaaccccgggagtcaggccctttgggcaggggagctcggaggctcaggatggcggatttcgacgaaatctatgaggaagaggaggacgaggagcgggccctggaggagcagctgctcaagtactcgccggacccggtggtcgtccgcggctccggtcacgtcaccgtatttggactgagcaacaaatttgaatctgaattcccttcttcattaactggaaaagtagctcctgaagaatttaaagccagcatcaacagagttaacagttgtcttaagaagaaccttcctgttaatgtacgttggctactttgtggctgcctttgttgctgctgcacattaggttgcagtatgtggccagttatttgcctcagtaaaagaacacgaagatcgattgagaagttattagaatgggaaaacaataggttataccacaagctgtgcttgcattggagactgagcaaaaggaaatgtgaaacgaataacatgatggaatatgtcatcctcatagaatttttaccaaagacaccgatttttcgaccagattagcatttactttatttatagagactttccaagtatgttgtctttccaatggtgccttgcttggtgctctcctggtggtgacataacattggttctacagaatcgtgtggtgttttttttgtttttgtttttttttttttttaaataaccgcatgttctaagtgtgcatttttgtcaatctttgcaacagttatttcatacagatgtttaatacttaagttattgtgctcttttctgttatgtattctgattttcaaggattacttttttgtattatcaaaaaaatac

SEQ ID NO: 971 - protein, 165 aa, Homo sapiens
MADFDEIYEEEEDEERALEEQLLKYSPDPVVVRGSGHVTVFGLSNKFESEFPSSLTGKVAPEEFKASINRVNSCLKKNLPVNVRWLLCGCLCCCCTLGCSMWPVICLSKRTRRSIEKLLEWENNRLYHKLCLHWRLSKRKCETNNMMEYVILIEFLPKTPIFRPD

SEQ ID NO: 972 - DNA, 22293 bp, Mus musculus
  misc_feature (1)...(22293): n = A,T,C or G
agagatagcccagtagttaatggtacttgctgcttgcagagaacctgagcttaattgtcagcacacacacagtggctcacaaccatcagtaacactgccaaaggatccgacaccctcttctggcctctgaagaacactgcacccacgtggtacacacaaactcatgtaaaaacacatataagaattacgttaaaaattttaatttaaaagtcaaaaacaaagagaactgtagtaaatttaaaagtctcagcagagtaccatgacttaattctataacctcagccattgggaggtagaagcaggaggatcaggggttcaaggccagcctcaagtacagagcaaactccaggccaggaaggagttcatgaaactgttgaaaataagaggtcctggggctgaagagatggcttagagctccagttaaaagcaccggttgctcttccaggggacctgcacctcaattcccagcacgctctgaccccttcacatagccacatgaaacaccaatgtacattaaagaaagaaaaagagaaaacataacttttgcgagagtcttcataaactgcaaagtgctatgtgaaggtaagagagaattgtgcttcagcaggagctgtggagaccgccttctcctgcctatctcttgtccatcattgagtgagtgtgagcaaggctgtttccagtcccccatccccacccccatgaacctccatctctcccagctctaatccagcagggggattcacacaataaacaaacctactcagcacagcacacagtatggaagaaagagataactgtcttaagagaagaagactatctgatatggtaagactatacagagtatagagtaaggattttgatctaaaaaaaaaaaaaaaaaaaaaaaaacacgtgggaaaatgatgtctgaggcaagacctcaagttgaggaaaggaagaggagacagagacggccatgcgggaagcaaagctgaggagccaggaggcctacagttggaatggtcagagagactgacaaggccttgttatggagggcctttctgtgtagagtctctggtctcattagctacttcatgctccttgatttacaggcaagagggcaacttctctgtggttcactgacattttgcaaagcagtcacacagaaacaggaaaccccaaatttccagtgtatgcagatgatgcatgagatgtaaagctatttaattttggtctgtcccctccacccccacccaccgccagcgcctaacacagtctggcatctgttggcacaccatcaaagcaggtcatgtaaatgaatggaaagatgatccgccaggcaaagagcaaactttgaggcagtgaaagaggtgagcccaaggcggtgcaccctggctctgactggaggggaactccctttagatggcctagccatgccctcagctcacacgtccgtctcttccccccccccccagcaccccgcgcgcgcacacagtgtctgcctcgaacccgcactggcgtgctcacaaattcgcattgcacaaagcgcatccatgggtccccacgcactccacacagtgcggacacgcacactcccctcgcacacactatgtctcaccttcacactgattctcaagtccatgtactcccgcctacccttcctcccccagcacacacgccacatactcaggcgcttgcctacaagctcaagttctcccgccccacacccacgcatgcgcacgggctcaggggaggagggggagcatgcgcacctgtggtggctctgccctgaagggcagctgctcaggtgggttagggattgatggtgccttgtttgggaggctatgggtcggtgcaaccgtgtggattcatttgtttttatcccgcgagcttgacaaggaagagggggagacccgggagggcgcagccgagcgctcggagagcagggtgacccgcaggataccctgacgctggggctactgtatgaatctctgcacccggacggggcaaatgcatgaacttgggatcggttcagctgcacaacctgggtggccaggttctgtccattttgatctgaggacaccgtccactgagagctatgaattgcatgaaaagagaagagggacttagcttgaaagtgcagcacttgggaagctgaggccggaagatgcaagttgaggccattcttggctgctgtgtgagatcctccctcagaagagggaagaagaaaccatggtcaaatattctggctctgctattttctggtgtttcgcagcctcggtttctctgcctgtgaaatgaggagccagactttcagagcaggtatgacttctcatctaggcggactatggactgcctgtctgacaaacactaagagttaacacaacagacccagtttctgcttaggtgcaatttgaagtcatctgggaaagatacccaaccagaagttaaacctacagaaattcagactgattgtagtgagcttttgaaataaaataatgaggttttgatttcattcagagcttcctgtgttctggacacgggtgcataaaataaggctcccgacccctaccctcctcttagttccagtctgctctttttttgtcacatgaaccatttgaccgagccttggaactttagtatgttggaaagccacatgaagcaagggttggaccataacaaaaaagaggacataataaatgtaccttccccacagcatcattgtgggagagaaacaccgtgtgaagtgttagcctactgccaggcacacaacggtcgcccatacatatttgctggcagacttgtctagaaccccaccttagagagatgagatctgagtcctggccttggcatctctacctgtcagacctagattaagccattgaccttgcataggcaggggctctgccccacaaacagctgaggtgatgtcactttttctaggagggctgctgggattaactgtgttatgtgggcaaggctactttgtctccctgacacacaaggctcttgaagagggtggtcttgtgaggaccattataccctcaaatggagccctccttcatacgtgggtgagcatacagctgtttacttgggggaaagtttcaaagtttaggatacagccccaagtagggaaggcaggaatgggactttggactaggtagggagtgggatgtggtgcggtatccctggcacatctcaggtccatgaggctgctgcccagaaatggaaggttgaaggagccaaggagaggggctctccagagtgggtgcaaaagccttgaagcctaaggaggacaggtctgggagaacttagccctgagctgaagccacacccagagcctctgatggcatctgctctgaggacagctgaggtgctgagcaacaacaacaataatcataatcagactttaggcacaatgggccagcagtccttaattcctcacaaactgtcaaggatgatggcttttatttttcttacttcacatacataaaaactgaatttcttctttcagtgtctctggcttcatttcagctctctcaactcaaaaagagagagagagactcttcaggactctgtgtgtcctgtccctgagttctttgatggtctgaaacttattcctcacgatcctggcagatctcattttaaatgtcacttcaggcatcgatttttgccaacacccagagctttctttcacactcccatggccttccgtaacctaccagctctaagttgatttgttgatccatttaataatgtattgggcattcccaaggggctggccttgtgtgctactgaattctcagctgagcctggcttatagtaggtgcccaatacacacatttggggtggggaaacaatgctgaggaccaagcatagccccctttgcccatcaaacaagtactccaccactgtacttttccatttatcaaagggttggatgaggttgggtgggtggggcagtgttaagtcaatcgcttcttgttccaggatgggaggaggaaggagaaggcctttctcagtatttgctcaggctgcctgtcatgaaaaatctgtaggatcttggtggggtttttgtttgtttgttttctgagacagggtttcactgtgtagatcaggctgacctggaactcacagagactcatgggccttaaaggcgtgcgctaccacgcccagcaaaactgggttactttggatgtttttataaaagctcactaggtgttttttggtagatgaccaagcttgaaaacaaaacaaaacaaaaacaaacaaacaaaaaacaatgagaaaggctgaagagtttctcaagtacaaaggttcattctccattgggttaaaatgaaaaataaaagtgcagggtccagggacttagactcctcatctggcatccttgaaagaaaagaaaaaaaaaatgaaagtggaggagagaaggaggaggaagggcagaaagaaaagtgttttgatccccataattccgcagctgtatcagtccaatgcttgcagcagcgagcttgggctgaggggagtagggaattggtgttcggtgaaaaactgccccctgccttgcctgcccccctcccctccctacnnnnnnnnnnnnnnnnnnnnccctcccctccctacctcccctcccagtctttgcgaaggcgcctttgctgtaaagaggagccaggctgagaagtgccagaagcactggagcgggagcgatggagggagggagggaggtggggcatttgcttcaattatccggataattgtccccacctcaggcctttgttactagaacgaaacaatattctattggatactgtctcggccttttccttgggctccccgtggtgcctcgcacacgctggtcacagagtaggcactcaataaattcattccagtgacagacgagcgctttgggagtgggagagggatgcctgcttagaatttggaggtgggcaaatctaagttaaggtgaagtgggggcggcggcggggggagggtatttgctgccgtcaaaattctgttcctagggccagaaggcccggaggagacagacaggcagcttttcctgaaatgctgagccaaaccgctgactcttttctcagaagacaccccctccctttctcagagggctcgattgaactcctgcaactgtgtggagcacaaaggggaattcaggtctctcaaaggcccatctactctgaataaacaccaggcagaagcaaaagcactttgggtactgcctcggcacagggtctgcaacctgttacctctctggattgggccacgtccgatttacattaaaagcaacatcactaaggcctttcagtagcctctcgctcagccagtgcaggaatgtggggaccgggaccactgctttcaaggtggggaggggagagagaaggcatttgctaattgcacccttgcctttaatgagattcttttcctccctactaactcgcttgcaggttacagccttatctggggacccacgttttccactctggctccacatcctgggaacaatcgccactccagagcctgaatggaaagcgagggcgccccatttctgctgaatggctgtctcagttcatcggacgctggagggcttttgatggcctcaatacaagttacgcccaaagagtgtctctttggtcagatcgacaacgcttggtttcacgtttgcaagttaaacgggccaaaacccagctgaaactcccacgccagacgccgggcgacatttccctccaccccgcacagagcaaaactagggaaagggactgggcagggggagggaaggggggctggcagggagggggagtggaggagagtgggtcctgattctcagtagcagtctaggagtagatgggtgggtgggggggtcgggggtttgtatttttcttgttttgtatttttttattttttttaattttgctttgctgacagctttacccgcaacaacaacaataacaaaataaaccgagagcatttttttccttgtcttcacctaggtagctgctttccctgaaaactcgactccttcataaaatcaaaatttatgattattcaaatgttgaggactgtgaaaagagaggaagaaagagagaaaattaatattgcagctgttcttctgattaatgagagataattgctcatgaaaagtcacccctgtggcattttgttgtctcctggatctttgttcttttccactattattgaggactttcttgaagactaagcggttcttttcaatttttgggtattcagaaagggttgcctggttacagagaatggggaaatctcgggctatatcgggtaagatgtgccacagacagcaataccacaatgccactcagagaaaaggatggatacaagttaacgatgcgctttcaataaaacattcatagacttgttcacgctttgataatgacctcattaaacggagctgggggcaagtaagtcctgtctcctgtttgtgttcggctaacaaaacccagctttgagatcattcatcgctttggaaactaatatgaaatcaatgtaacaggagcaaataaatccgaggcaacccagccgactccccggctgcccagatctgcttgcagcttcagttggtaactggagaacgatagaggccaatgctaaaccaggggttgggggttggtggaggattggaggggggagtactttgaaggggatacagagggggtcgcaaagtgggagttatgcctgaaaataaaaacccagtggctaagcacatcaacaggtcagagcactggggcccgatgaaaaagccatgccactttgcccgtgaaaggaagttggaaaagaaagaagattgagaggggagtgtgaggtttgtgtcaggttccatcacaggcgctggggcaggcagggggtggggtgttactatcaaaccatttgaaaactagaatccaagtgttcaagtcttaaggctgagctggaaggaacccaacctcagagcccagtggcaggaaggcactgttgttctttttacagctgctttgatttttttcccccctaactggaaggcaggatgaagatgctctgtcttggaacagggaaaagcaattttgttacctttgcctttgtaacaccgtctcctactcaagggagacaatgctggcccctaccatcctcagcaaaaaagaaggaagcaaagggcttcccctccccttaaaagaactaattttctccttgaattatgaaagtaatggctaaggtaacagcctgtactctgtaccagactgcttaatgccgaataaatccttccacgtggctccccgagtcctggcaattagagctcattacaggctcataagagccctcattttagggcttacttaatggacgatgaaattttatcagacagaatcactgagaaataaaattgtgcgttggggcaagtgcagtggacatgtcttgccagtctactggcctgctcaagagaaagcccagcccgggggttctcttctgctccgagcagtttgcagtgctgcttcaggagcaaaggttgcaactctgcccaggctgtggagggtaggctggcttggtgagatggcagggggtggagctgacttttctggaaaaaaagggagggagaagacagatatagagggctgaggaaaagaaagagcagaggtgatagaggagatacacctccccccagatatttgtttttggtgggtctaagcaatcaatcaaggactttagtgaacaaatctctcagaaacagtccagccttcagcctcagtcaggcctgtcctgaagcatccccctgaaggcagccatcagcacccccttccctcccagcccccttcctctcaagatcccttgactgtggactttgaatgcatccacagtccaacataaaccaaataacatgtaagttgtctgactcggagcccctaatatgaatgggtttgtacaggagaaccatttccaaaacattaacagagcaattcttggaagcacaccagaagccacagagaatactgtcatgcaagtccccgaggactgtagataacctacctacccagagaaagaaagagtatacggctggcttctctgggcatcatcctattgaagccattgtgcaatataggccttaaacacatatcccgtgactggcaggagaaatagctcaactaaggacacttgttgctctctggaagaagacctgggtttggctcccagtacacatataatgactcacaaccaagttctagggggatctgatggcctctggcctctgaggacaccaggcacaaatgtgtgcacatccttgcatacaaacaagcacaaccctcctcacttaagtaaatctttcaacataaataataatctaccacaaggctatctccgtttttgagctccagtatcctttcacagtgttagaaaagacttgtaaagaatgcagaagctgcttgctcctctccagtggaaggagagagtaggttggtcggagctgggctggactatgtgggctggatgaaaaggaggagctttggaggctgtctaaggcaaaccttgcagtgcagaagtagttacaagtgagcggggaccccgtgctcagccccgagactccttaattgttgtcacaagatgttggattagcacatttctggaatagctgtctgtttacactcaggagacccaccgtccactaaccactttctaattgaattctaatcacattcaaatagctcaataaccagcctcagctgcaattcataaaactttaattgccatccataaatcctgggctccctagagtggggcatccctacaacccaattatacacttccagcaggcaagagaggggtggtcacagagatggaaaggggaaagaaagacaggacagacacagaaccctgagcctccaactgctgttccctgcccttgatcttcaagttaactgtcactgttgtaaactcacacttgaagttagccattttggtaaaaggacaggggagaaattgctgtcacctctgtggccttgactttctcccaaagacatctagatggcagccacctagcaggtaggtgcacaagtctttctgagccaccaaatggaggtctgctactaaactgctccttaggtacaggcaggattccaccactagctgaatggcggaataagcaaggatgcaataagcatctattgagaagggtggggtggtgttagcaggagatcacttagaccaagggaccgcaagggcctcctccagctgctaccccagtctctgcaaaatgttcctggtgaagtttagcggaggttgggcttggaaactatgtaactgcttgaaataagaaaggattgactctttgcagaaggcagagctgctggttagaaagatgcacaaggaaggattagtggtctgagtgacctcaagagaatacaaggacatttgagaattgatgtagcctggagtgcttggtttctaagctgggttgttacccgccagaccttggccaaatcgaaaagctggggagcaagggcagatatgaatgtggtgagcgttagaccggccgacctccactacaaggccacatacgctggtccagagcagaagtctcaagctttactgcgcagctagggttggctcctaggagcttaaatgcattggttatctcagtttaaatggcttggaggtccccacctggtgctctctgcagtgtgtcactgtgaagcgttggacagaggcccaagcgagggaggaaggtaggcagaaactggatcgctgagattttccgctgagagtgatggagggagaggaggtcgatccctagcaaaattaacagaccctacacttagcgaagtctccctctccccctcgttcttccctgcctccccccacccccacccctccgcttctgttgtgactcgggcagcctatcccgagggtggggagctgccgaggagtctgagctgagcggtactccgcagcatcacgtgccgcggtgggggctataaaatcctggagccggggctccgggcgggggacgtgaggaccaaccctctccagggacccctttgttcgagtcccagacacctcagcatccccaaggacttgaccgcccgcgtgcgcccagctttccggacagtgctcagatagcagaaggagagaaggggactcagcagcccgcaggacaagccatccatcgacatgtcgcgctccttctacgtggactcactcatcatcaaggactcctcacggcccgcaccctcgctgccggaatcgcacccagggccggatttcttcatcccgctgggcatgccgtccccgttggtgatgtcagtgtccgggcctggctgtccgtcccgcaaaagcggcgctttctgcgtgtgcccgctttgcgtcacctcgcacctgcactcctctcgcccgcccgcaggagctggtggcggagctacggggaccgcgggggctgcagtggcgggcggcggggtggctggaggcaccggcgctctacctttgctcaaaagccagttctctcccgctcctggggacgcgcagttttgcccacgggtgagccacgcacaccatcaccaccacccaccacagcatcatcatcaccatcaccagccccagcagcccggctcggctgcagcggcggccgcggcggcggcggcggcagctgcggcagcggcggctctgggacacccgcagcaccacgcacctgtctgcgccgccactacctacaacatgtcggacccacggagattccactgcctctccatgggtagggcggggtacctgcgtgcctccggggaaacaaactttgcgccaccagggaaggaggtgggagtaaggtgggatcttctgtggaactgttgagatcttcccctagaaattccacggaggtggaagttaaggagtcaacttcttggcgaggccttgtgcccttagctctacaggtgcacaagtgtcgcctgttatctgggctttggagacctggatcaagacttcagagaaataggaggttaaactgactgagacttggggtggatgcgtttggacctcagtgtggcatcttagcttccctgttggttaaaggctgtctgtgcctttggccgaggctgctagctggttagctttgctaggccaatggaagacagacaaggggaaggagaaggcagtaggtgcaagttccactggagtcttttaacttaaaatccaggacattaaaggccttaattctcatgaacgtctgtctttcttacactcccagacagaccagggacaaacatggatgtgttgggttagactgggttctggagccgcgttctttccaagggttgtcaagtagagtggggtcacttttttttttctgcggttcatcacctctctgctctcttttgggtccacaggaggctccgataccagccaggtacccaatggcaaaaggatgaggacagcgtttaccagcacgcagctcctggagctggagcgagaattctcttccaatatgtacctgtcccgactccggagaatcgagatcgcgacatacctaaacctgtcagagaagcaggtgaaaatctggtttcagaaccgtcgcgtgaagcacaagaaggaggggaaaggcgcttcgaggaacaatcacacaagctgcaagtgcgtgggtagccaggcgcattatgcgcgctccgaggacgaggactccttgtcccctgcctcggctaacgaagacaaggagatttcccccttgtaaaggcagaggctccttctgctacctgctcccggtaccctgccctcctcctccccatcagcacagggaccaaagttctagtccattgccctcattccacctggaaaagaaactctgaaaagtccggggaattcaatgccgggcccgactttgaagctagctcctctttatctgggattccactcagttacggattggttttttgtttgcttttttgttgtttttaatgtaaatatctagaattctaaccagtctcatatatcaggaaaaaccagggttgattaaagtttaacactgtatggggggaggggttggttgaagacgcatgccatttgcccccctgtcttttcagaacttgatgagaagaggggtttctttattgtttttgttgttgttttaaaatgaaatcattgaagttgccattaatatagagagttaaactccgtaggtcttgttttctgaaaattttcatgggggagaattttaaatccaggtctctggaagtccctttgtatgtgaatagttttatataaaatacatatttatatttatttaaataaatgaaacgaaataaatattttttaattcgtggtacttgtccttatccccccccccacacacacaccatatctagagacagtcatggaggagggacttaggggttaaatactgactgcaacttaatgtgggtcacttagctgatggaacttggaactaaaggttttgtgggtaacagaaacttcttaccaaaaagaccttcagtcctcatttgaggtgacccaccagctagtgagcctttcaaaaaccaggtgacagcccatttggcagaactgggaactaactgtaggaggaacactgaagaatactgagggaacctgatatgtagtagaggggaaatccaacatccacaatgtttccattttatttgtttgaaataggttcacactatgtagcccagggttgccttccactctcaggcattcacctgcctctgcgcacatgccaggcctacagccagttttcatttgcacttgatcttagcccccaaacccactatttatttgcctggtactttgtcctcctcccttctggtctctcaccttgctcagtgctaaaatctgaaccctgtgaagcaattcacaatctaggaatagtttttaggtcagggtgaggaaagttacaaatgacttctatacacgactagaaaccccgatgtgcttggtggcttctatacttcagagttagctgaatgtcctcagtgcccagattacaagaagctaggaacagagaagtgacttttctaaatatttacaatctcctatttccaaaacaacccaaaagatatcttagagtaatactgtcctctgggagcagactttgtttattatttctgctgttgtaagttggtctacttaacctctctgtgcccaggagttcatacctgctagcccatagcccttctctcagcaagaccacctgggataggtgtctcagtctggatctgtgtctgggagagaaggaaagaggaagagtggtttctgagtaccaacaatgcacactggtgggattcctgactatttatataaagatgtcacctaataggctcaagccacaaatagtgtttcacatcccctcccttccccctttccctaaagggatttttaggtctgatgttttagtccagtcctcctcagcaaaggagaaaggaaaggacatgaccgtggtgtttatgattggcagattttctgtgtcaggcacttccccaccccagacacacacacacagacacacacagagacagagagcgagagagcgagagagcgagagagcgagagagcgagagagagagagagagagagagagagagagagagagagagagagagagagaagagagagagagagagcactctcagaacttcaggaacaagattcattttcaaacccctttagggcaccaagctgaggcaggcaggaggaagggccacagtgtcctggccaaaggggacctgtgagctactttgtatggagggttgttcctgcttttgtactgttgtcccaagccaactcatgctccttcctggatctctgtgactctcacaccaggggaaggaggtaggggttgggagtgtcctactggctgggagatgacccagcttgctacatttcctatttcctaaaaaaaaaaatcagtctctctttttcctaagaaacagcagcaatggctagaggccagtgggaggaaagatgtttgcaggaactaggaatgggcttttaaagagggtcgcctcaatgtccactccagcccaagcaaagcctcttctgaggcatgggcagaccatcacctttctgtgcacatccttgccagtcccactgcccatccttgagtctggctccggtatggatctcagcccctagccttgcaaggtctaccaggttgcagactttgtggccagattgctgagtcacgtgcttgccactcccagcgttgtgcggagcctggctcccccgctggtgagaggagagctagctagggctgctgtccagactgtggactgctaagatgctgtcaatctctctctctagcttccatcttcaagaaaattcctaaggtcgttcttccagagacaaaaagattcttggccaaagatacttaagcagacctctgattaaaagaaagattctctaaaattctggaagaactctgcactttctgtcacttaagcaatggaacaccagttctatccaactaggatagatttgctaccctcttcatccgctaccctactctcactcagaaacccccccaaaaaaactcaccccagttaaaaaatttttcatgtttcaaaataacacttccagaatctagcatctgactgtccatattagattaagaaccttttagtcagctctcaaacactacaagacaagcacaaaaatagtctaccaataaccatcagatcaagatcaaacgttgtaagtcatgtccccttgggtgcactggagaaggtttaagacgttgggagccaagtggtcttggactttccatgtgtcccacttgtaacccaccacacgctctttatccagagcacagcccatcataatccttaaacacagccaggaaaagagagaggaaaacttgaagtagaaaccaggaacttttttttgaccaaaaaggtgtcagtgaggaccactgaaggtcttgtgtctaacctggagaactctagcagctgggagtttcaggataaagggaagatgaccagggcaccttatgccctggctcaaccaggacaggcaaggaggaatgtgaccctctgctctcccatccagtgaccaacacttgctctgggccaagtggctgatagggattgtatccccaggctcaattgcaatctctggcaaaaggaagccagcagctcattgaagtgtcagaggccccaggaatgaagacactggtgccagtagacctgtcttctctggagttctaattctgaactggtttagtttgaattatgcatcaaagccttatttcttgctatttctttttccaaatagaaacaaaactcagtgaagtacagttttccacttctggccttctcagcctctcccctcccccctgccactcgaggccacttctatccaattacatccgattaggattttgtccatttgcttaggtcacactgactggtcagacaattgccggaaaggtggtagggcaaagcaaaagtggtcacaagtggcaaagggagctctgtgtccacatatatgcagttatgcaggtatcatacatgtatgcttatgtgccagacacacacacacacacacacacacacacacacacacacacttatacacacggcagggtgggggagaattgagtagtcatggtgttgtaaatgaaaagtcaagaccaataaacagaatcctggggggttttagctttctttttcttttctttttaaaatagagcatccttagttcatgctgaccacaaactgtcattctgtcattgtagctaaggacaatctcttccctcatccaggtgctgacatcacctgggttatgcggtgctggggcaagaacccagagctttgtgctacctatgaccagcatcttaactaagctccaaacccagctctttaaaaacatgttttcatccttttttgcaggccctgctccttgagagatgcccttgaagatggctgggacttggggggaaagtctgaggtgagagggaggagaattctgggacaggagtgccagccagcccacccttaatgggagggagagaatgacacttgcaattgaacccatttgctagaggaaattgggtttaaaggagcaatcacttctttaaaaggagctcctcccatcttccccaaacagaaggctgtcccaggggatgaatgcgcactgtgcatcaaagcaattgttccaattttcattattcacagagaatctttgaatgtacctgttaaggtgacagaccttttaaaagggaacatttttccatgcaattaattggtgcatttactaggtttctattaacataatttaatataaatctattttataaatctttaggctcacattactgaaattgagctctttttagaaaaaaaaaagtgcccacagatgcctctttcttaaattagatagaatgaaatccgaaaacttgctattctaagacagctgcaaataagaaaggcaaagggagtcttttgtattgtctttgttaatgggggaggtttggagaaagcaggcgctcgtatcacaggagagattcaagcccagcctgagctctgtatctgaaacttgtaggacgagctgcatttgggccaggcagaagggggagaacttaaagctatgtcttaggaacagagttgaatgagtgctcagatgagagaaaaacaacagagaaaaaagaaacagcagcaatccaacttccgaagaaacctgaaagtaagtttcttctacctagaggaaggaaacccaaagccggtgaaacctcacagtccctaatgtctatgatagatatgtaaccctggctccttagaatcaggtgcattctccaaaattttggaggccccatcatgtctaaaaacagggttttgttcttctttggtctactgatgtcagtaagcccccttctccaccatgttttttgcttgtgtcccacctgagcactgttttcttgaacccaatcgtatctctgttgagctttcccagagccaaacacagaaagggggcaagggctcccctcggagaatctggacagatcggaagtgtatgctgtgtgcttaggaaagtaactagtttcagattaatgaagcagtgacaatttcaatctgcttgaaggcggaggttggcactgcccaggcccagcgtggggagctcgccaggcctggctttatattgtcctcatttctgaagagcagacaaagatggatagagagacattgaaaaggagggagagtatttaaaacagctccataaagcaagctgtcactttaagacaagaaccatggtgctttgatgactttgtattagcggcaccatttcaaataagggacttcagtctataaagaaagggagaaactgaaaggggaaagagggagaggaggnnnnnnnnnnnnnnnnnnnnnnnnnnnnnnnnnnnnnnnnnnnnnnnnnnnnnnnnnnnnnnnnnnnnnnnnnnnnnnnnnnnnnnnnnnnnnnnnnnnnnnnnnnnnnnnnnnnnnnnnnnnnnnnnnnnnnnnnnnnnnnnnnnnnnnnnnnnnnnnnnnnnnnnnnnnnnnnnnnnnnnnnnnnnnnnnnnnnnnnnnnnnnnnnnnnnnnnnnnnnnnnnnnnnnnnnnnnnnnnnnnnnnnnnnnnnnnnnnnnnnnnnnnnnnnnnnnnnnnnnnnnnnnnnnnnnnnnnnnnnnnnnnnnnnnnnnnnnnnnnnnnnnnnnnnnnnnnnnnnnnnnnnnnnnnnnnnnnnnnnnnnnnnnnnnnnnnnnnnnnnnnnnnnnagagagagagagagagagagactcttgcgcactgtagcgagactaattcctgggcagctacttgatttctgaagttctgggagaaacaagccacagcaggtgcagagacaggggtgggggaagacaggtggaagttgtcgcgatgggaaagagctccgggcccaagtgcagccggcgactcagagagcagcggccagcttggcctcagtttgctgagaagagcgagagagagcagcactgcccgccccgcaccgttggggattctaatggaaattttcgagagcttgctggaaaaagaataggaaggggggggggggcgggctgctttaagagaccaccttcacaaagcctaatttgaattatttggggtcaagcagcagcaagccacctcccctcttccttcctaattaatgaccatgattagttattaggcgtcttgaggcttcgaccaagctttgagtagtttattctaggagctggttttaacttgggagaagggagctggagttaggtttgttgttgttttaagaatggcttcattctgaggctcaggactgacctgaaattatcattgtagcccacgccagagtaatcctctgattacagagtgagtggtcgtcatcctgggggctgggttacactggaaggagggagtttagacagggcggtatgtctgtaggtctgcttctcttcctgtcttcatctcttccctcgtcttccatcctcctcttcctcctcctcttccttctcctcctccgtctgtatgtctctctgtctgactgtctctctgtgtctctgtcctgtctgtgtgtctctgtctctctgtgtttctgtccctatgtctttgtatctctctccctcccacttctcttcccccccttccttttctctctttctctctccactatttctctctccccctcccctccgttcctctctcttttcttcccattgaatccaccctggctttagctcaagtttcctaactggtaccccgtcttccaccgctggccctaaagcaaagacgcaggtgctgcggaccgcacttgagacggaggcctttggggaatcccgctaggtccccgggcgggcggtgggtggggcagtttcactgtctggattcttggatcgcaagttcctgggagtttcaatgttttttgtcgttgttttgtttctgccaaggaacttcatatatatatatacacactttctattttattttatcttgttttgttgttaagacttagaaaccgggacaggagaccgggtggcctttgaaggccggcgaaagggctcctccgtccgtggcgctggagggagacgcgtttagtcactgtttcattaggcactatttgaaccttgcaacatgtggtactttctgggcaagctgaaaagggaggattatgtaggagggacacaaggaaattagcgaacggttaatttaactcgttttctgctagacttttcgatacattcctaattgactgaggggcaggtgaagctcccgccccatgcaggctcattcacggtgggaataaatggctttttcaactcacactgctcacaatatatcatcaggggaaagacatgcaatgaatatgttgatttttttttattaatggaattacaccctgccatgcaggtgtgagggtaaaaaacctatactgaaatgaaataagattaacaatgaaattagaattttattagctttctatgtcacgtagacctggatttgaagtgtcaaaacaagcaacgagaaaagatagtctgtaggcagccctgccaatcaaccaagggaactgcttggtctctaactctggatcggcttccagttcctttggcatctcctctgggctgtaggtaggaggaggcaagtgctggagaactccgcctccagggaaatcctgggacccataggaagaactcttgggtttgaaaggctgggtctagaataagcgtaggggatgcttctagggcctagggtggcccgaggccgctccgaggtcagccgcgccctgctggcctccagcttcgcgtccttcagatcagctgctggggctggcagtgacccctgggaattgagagaaaagcccgaaggggagaatgaggggcgcgaggcccgcggggcgccccttggaaacggcgggcagttttgttatctcgggcccccggagcgtcagcgcagctacctgggtctggcaggcgcagaggtgccctatgcaaatgactcactattagaccagaaagaaacacttcaaatggccctttgtaaccttctatagaaaatcgaggtactctgcatgacaaagcacaattaagctttctattcaggagttctgcagctggtagcccattgggaaagtgggaggaaaccagaatatattaatagtgtggcaaaagttttttgtgtctgtgtccttttcggggttgggactggggaggggccatgggtggaccccgaggggaagaaggctccgccttggatccttgccacctgaacgacaacgcctctgcccacgtggaaagcccctcttgcctggagaccagtcttatgaatgatgtccacaactcccagagagctgagccgggtccggcaaatcccaagtgtgggatgggcaggacgcctgtcggtgcccagcctccaagtcctcagccagctccaccggtcccctgcctgagcaggaaccgggcgtctcaggcctggccagggcacctggacagagttggctggtgttgcgcaccagctcccacgaagatgctgaggagggacggttcacatcacacgtccccgttggttcattttgccaaccnnnnnnnnnnnnnnnnnnnnnnnnnnnnnnnnnnnnnnnnnnnnnnnnnnnnnnnnnnnnnnnnnnnnnnnnnnnnnnnnnnnnnnnnnnnnnnnnnnnnnnnnnnnnnnnnnnnnnnnnnnnnnnnnnnnnnnnnnnnnnnnnnnnnnnnnnnnnnnnnnnnnnnnnnnnnnnnnnnnnnnnnnnnnnnnnnnnnnnnnnnnnnnnnnnnnnnnnnnnnnnnnnnnnnnnnnnnnnnnnnnnnnnnnnnnnnnnnnnnnnnnnnnnnnnnnnnnnnnnnnnnnnnnnnnnnnnnnnnnnnnnnnnnnnnnnnnnnnnnnnnnnnnnnnnnnnnnnnnnnnnnnnnnnnnnnnnnnnnnnnnnnnnnnnnnnnnnnnnnnnnnnnnnnnnnnnnnnnnnnnnnnnnnnnnnnnnnnnnnnnnnnnnnnnnnnnnnnnnnnnnnnnnnnnnnnnnnnnnnnnnnnnnnnnnnnnnnnnnnnnnnnnnnnnnnnnnnnnnnnnnnnnnnnnnnnnnnnnnnnnnnnnnnnnnnnnnnnnnnnnnnnnnnnnnnnnnnnnnnnnnnnnnnnnnnnnnnnnnnnnnnnnnnnnnnnnnnnnnnnnnnnnnnnnnnnnnnnnnnnnnnnnnnnnnnnnnnnnnnnnnnnnnnnnnnnnnnnnnnnnnnnnnnnnnnnnnnnnnnnnnnnnnnnnnnnnnnnnnnnnnnnnnnnnnnnnnnnnnnnnnnnnnnnnnnnnnnnnnnnnnnnnnnnnnnnnnnnnnnnnnnnnnnnnnnnnnnnnnnnnnnnnnnnnnnnnnnnnnnnnnnnnnnnnnnnnnnnnnnnnnnnnnnnnnnnnnnnnnnnnnnnnnnnnnnnnnnnnnnnnnnnnnnnnnnnnnnnnnnnnnnnnnnnnnnnnnnnnnnnnnnnnnnnnnccccccagagaaatgtttgcttctaaataagtaagattcttagcctaacttagcattggctaaagtagattgtttacccatctagacccactcccaccccctcttcacttgttgggagtcctaagaccctaccttggtggattgcattgattttacgcagtaacttgtaacatcttgcaggcctttgccagctgcttccatccctactggaagaatgagtggcactcccagtgacccaacaacctgagagggcggggcgaggagtgcttattggaaatgttatgtctcagttgctgcttctctctagaaattctttctatcagagacctttcccaagactccagcttctaaccagattcccctctaaccttcagacaggggtggaaattcctccagcttctgctaatttgcgaatttctgcaaagagtccccttttcttctaaactgactgcactagggactgaactcagaggctccccatgggaaggtaaatgttctgccagtaggctgcattcccaggtctcctctccactttaaaccttaattaactactttgagacaaagcttctaaacctatgtagccaaaaatgaccttgaacttctgatcctctagcctccagttcatggcctcaaccatccattcataccctgttggagaacaaaccctggtccttgtgcatggtagggaagcactccactagctgagcaacgtctaccactcattttgctttaaaaatgtattgtccttgttttgttttgttttgttttgttttgttttgttttgttttgtttttgagacaatgtttctctgtgtagccctggctgtcctggaacttactctgtagagcaggctgg

SEQ ID NO: 973 - DNA, 1350 bp, Mus musculus
tgaggaccaaccctctccagggacccctttgttcgagtcccagacacctcagcatccccaaggacttgaccgcccgcgtgcgcccagctttccggacagtgctcagatagcagaaggagagaaggggactcagcagcccgcaggacaagccatccatcgacatgtcgcgctccttctacgtggactcactcatcatcaaggactcctcacggcccgcaccctcgctgccggaatcgcacccagggccggatttcttcatcccgctgggcatgccgtccccgttggtgatgagctggtggcggagctacggggaccgcgggggctgcagtggcgggcggcggggtggctggaggcaccggcgctctacctttgctcaaaagccagttctctcccgctcctggggacgcgcagttttgcccacgggaggctccgataccagccaggtacccaatggcaaaaggatgaggacagcgtttaccagcacgcagctcctggagctggagcgagaattctcttccaatatgtacctgtcccgactccggagaatcgagatcgcgacatacctaaacctgtcagagaagcaggtgaaaatctggtttcagaaccgtcgcgtgaagcacaagaaggaggggaaaggcgcttcgaggaacaatcacacaagctgcaagtgcgtgggtagccaggcgcattatgcgcgctccgaggacgaggactccttgtcccctgcctcggctaacgaagacaaggagatttcccccttgtaaaggcagaggctccttctgctacctgctcccggtaccctgccctcctcctccccatcagcacagggaccaaagttctagtccattgccctcattccacctggaaaagaaactctgaaaagtccggggaattcaatgccgggcccgactttgaagctagctcctctttatctgggattccactcagttacggattggttttttgtttgcttttttgttgtttttaatgtaaatatctagaattctaaccagtctcatatatcaggaaaaaccagggttgattaaagtttaacactgtatggggggaggggttggttgaagacgcatgccatttgcccccctgtcttttcagaacttgatgagaagaggggtttctttattgtttttgttgttgttttaaaatgaaatcattgaagttgccattaatatagagagttaaactccgtaggtcttgttttctgaaaattttcatgggggagaattttaaatccaggtctctggaagtccctttgtatgtgaatagttttatataaaatacatatttatatttatttaaataaatgaaacgaaataaatattttttaattcg

SEQ ID NO: 974 - protein, 223 aa, Mus musculus
EDQPSPGTPLFESQTPQHPQGLDRPRAPSFPDSAQIAEGEKGTQQPAGQAIHRHVLLRGLTHHQGLLTARTLAAGIAPRAGFLHPAGHAVPVGDELVAELRGPRGLQWRAAGWLEAPALYLCSKASSLPLLGTRSFAHGRLRYQPGTQWQKDEDSVYQHAAPGAGARILFQYVPVPTPENRDRDIPKPVREAGENLVSEPSREAQEGGERRFEEQSHKLQVRG

SEQ ID NO: 975 - DNA, 22475 bp, Homo sapiens
  misc_feature (1)...(22475): n = A,T,C or G
ttccaaaaccataaaaaatccaaaatcttcagacacatctggtcccaagcatttctaatgaaggatactcaatctgtataaattatacacaatttaattattttattttatatatatatattttttagatgaagttttgctctatggcccaggctgaagtgcagtggtgcaatctcggctcactgcaacctccacctctcaggttcaagaattctcctgtctcagcctcccaagtagctgcggctacaggcgtgtaccaccacgctggctaatttttgtatttttagtagagatggggtttcactatattggccaggctggtctcgaacttctagcctcaagtaatctgcctgcctcggcctgccaaagtgctaggattattgacatgagccaccacaaccggcctaatttaacctaaatccagaaataatcccttaaactttgtagctcacaaacgcatcctccctctttccccacaacattccatcagactcagggaacgtcatcacacatcaacgtcgtcatagtttgtatactgagtgctaagtatgtgcaaggcattgtgccaagggatgtcaggcttaactcacttaatgctcacaaccatcctgtgagaagagggtcattattatttccatggtcagagagaaggtggattcacatccaggacctcctaaacccaatcccaaactcagtggtgcagtgaaagggtgaggttgggttggagatgaaatggatttgcactgatttcaatgcatcgtcttattacgatcagtgtttgtctcataatctccatgcccctctgcttgaggacagaggcgacaaaacttgtgtatgactggcattttgcaagctggttacacattaataaaaggcccagtggaagttccaaaacaaatgagatctaagctatcttgttctcacggtttcccaagcccaagtagagcctggcatactataggcacaccatgggtgctccctgagtacatgaacataaagatgatccacaggtgggtgaacaatactgggggcaggtgaaagggaggacctcgaggcaatactgccagagcccctcctgcttagagtgtccaggcttctacatggggagacagcgcaccccccagacactcccgcccactcctttctggctcgctgagtgacgccagtttcaagcctcagcccacgccaggctccaggaccagcagagcgggtctgcgcggacagaggcactgggctgcgcccgtagcgcaccccaccaagaggaaggcgtgcctagtggggaggcggggctccaggggccgggcacacgcagacacactcctgctctctctacgcacgttctcacactctcattcacaccgcactcaccctgtgcacatccccagtttctcgtattcctcacattcacacattcatacactcatatattcacacacacccatgctcccaaacacgcttcactcacacagctccgcgcacagggatcaaagaccacattgggtacagtgtacactgcttgggtgatgggtgcaccaaaatctcagaaatcaccactaaagaacctatccatgtaacctaacaccacctgttcctcaaaaaactattgaaataatttaaaaataaaaaaggaaaagcaatctcattccctaccctcattctaattcacttttcacctcttcacacaccatcacgcccacgtaccttaatctcactgttgacagtacacttatgctcgcgctcatgcacactcgcccccacctcgccttcgctctttacacgagcttgcgcgcagacacactcaaggactccctacccacttacactcacgcatgcgcacaggcgcacacgctaactctgcctcctcactcgcgctcgtgcatgcgcatccgtcgcggagaggactttgtgcctggtgtgggagcgggtgtttggtggcctttgcggatgggcttgttttgaggctgtggggtcagtgcgatcgtttagatttccttggtttcccagtgagaaataagttagccaggaagagagagaggcggagacccagggagaccgagactggaggaagggagtaggttgaggttttagagccgtgggagcaagagcgccgggtaggagctgtcgcgcagagagcacctcgcgcagccccagagcctgtttgtttaccctgttcctcggagcggcttctccagcgtctcatttcttctgcctcccttgccctcgcccaggtgtgggacgcgggcgagtgaggacagacttacaaccgtcctcggccgcgcagcacagggttcccgcgccctgtccctatgccccggggacacagggcaggaggctgaaaaagggactcagcgttagaaactatggttggaattctccccctgccacttgctatgtggcctgggccagtttaccgttgtctcggagcctccgtttcctatctgaaataaggaatcattcattcaacaaatattaattgccatcctaatatatgtcacctctggtctggacatttggcatacactggtgaatacataaaacagacccagtttctgcccaggagcagtttgcagtcaacaagcatacggattgattatgaagagggcttttgaattaaataataaaatattgctttcatccactccaaatgtttttcagcgcttactgtgttctgggcacaggtgaataaaaacaatcatgttccctgtcctcattctaatttcagtccgtacattggactggccctcagaacctttaatatgtaggaaaaccaaccacactaaccaacaaatggacagccaacaaataaggaagtaataaaagcacctacctcacagggttgctgtgagaaataaaggaggcattaaagtcttcagccactgccaggcatatagtaggtgttcaataaatgctaggtgttatcaggtggttagtattgcttagtgcctaaaaggctctgccatcactagctgtgtgaccttggttcagtctttgaacttcagtagttcaaatagggttctccgcaaacataatgcggagaaaataatggcattttatctgggagggctgttgtgcggattaatgaggtcatgcaggcaaggctcttggttcaagaactgccacacagtgagagctcagaaaatgtacctacgagtattgtcatatactcgaaaggcgactgttttcctcctatgcaaagcaggtgggtgtgcagcaaagctgggaggtttctaatatcataggaacgttttgaaatttagggcgcagtcccaagtagggacggccaggacgccagagcctttgacgggggtggggagtggcgaggttaatgtaactgctgaacaaacatatgcccagaaaccgagggatagaaaggccccacactgggcgccttcagggtgcgagcgccaggctgtggaggagccttagagggcaacactcggccgggaaaaggcgcggggggacggagagatgattgtgcagcggcttcctggctcctagttgccaagcccagggactctgatacctaatttacaagcttcaagagcctatggagctgcaggtctcagataataataaaaccaacaagagaagccacgagccttaccaggcaccaggcccggtgttaggcagtcctgaattcctcacaaaaactcgaagacgatggcattttctctattttacagatgcagaaactgaaattctttctccactttcctaggcctcctttcagtttttgcaattaaccaagagaaactctcagaggctcccgtgagcacccttaggtggccgggaacgcattccccatccctctttcccaggccaacacccgcacatcttgcaggtctccgtttaaatgtcacttcaagcttcggttttatcatcacccagagccccttgagcttttctttcatattcacacgacctttttaactcaccagctccgagttaatttgttgattcgcttaacctggaaactccccgggggcgggtcttgtgctactgaattcccttgcgcgcagcctggggtataataggcgctcaatacacactttccaactatcaaatgaccagataaggctcaaaaaagttacgttgctctcttcagattccatggtaggagggcgtagggggcaggatttatcagttatttctcaactacatcagaaccgcatgcagaattctggttgacttctgtctccccctccatctacaccccgccgtgttccagcctcacatcattaaatcgaaatcccttaggtaatcagtatttttataaagctctccaggtgatttttgtagatgaccaagatcaaaaaccagaagggctgggctgctaaaaattataaagaattgctcttattttagtgacttttttttttttaagtctttgctcccataactaagcagctattttggctccaagctttcagaaaatttaggccaagggaagtggggaattggtatgcatgtgaataattcaaccctcctcttacacactcctgcctcccccgcccgccctccaatacaaaaaccacatctctgaatagggtagtaaaaaatagtaagtgccaggagaactggagagggagggagggaggtgaagcatttgcttcaattatccggataattgttccccacctcaggccattgttactgaaatgaaacaatattctattggatactgtcttggccttttcaggcctgctccctgcagtgcctagcacacgctgggcacagagtaggcgctcgataaattttattctgatgacagaggagagctctgagggtgggagagggatgccttgttcggcttgaggatttgggggtgggcgaatattaattaaagtgaagtggggagcagaggggctgtgtggcaggcattcagtgccatcacaacttttttccaactgggccgttcctgaaattctaagccaaacccctcacttatttctcagaagacctccactaccaccccccacccccctctccccgctgcttcttctcagagggccgaattgaactcttgcaactgtggtgagcacaaaggcgaattcaggtttctcaaaagcccatccgttctgaataaacaccagggagaagcaagattatttttggtggtgcatgaacacagggcccacagcctgccctccctctagaaaggccttccctggccttgcattaaaactaacaatattggggcagctgaaggaatagcctggctcctgagccccccatcactcaagcagtacaagaatgtggggactagctcccaactgccctctttcatcttgacccacagcttttcaagaggagcttgagttctctatgagtgtgtatttgctaattgcagccggggctttaatgagattcttttaactcccccaagctcgtttgcaggttatagccttatctggggacccacgttttccaccctggctacacatcctgtgaacaattgcctctccagagcctgaaaggagagcgagcgccccatttctgctgaatacacttctcagttcatccaaggctggcgggcttttgatggccacaatgcaagttacgcccaaagagtgtctctttggtcagatcgacaacgcttggcttcacgtttgcaagttaaacgggcagaaacccggctgaaactcccacgccagacgccagggacgtttccctccgccctgctcagagcaaaactggggaatgggtctgggcggggggaggaaagaaaggaggggtagttgtgagcagagggtgggggagaagagagtccttattctcaacagccatctagaagaagaaagggggggggcattttctctggcatttcttatttttattttttccattttgctttgttggcagctttacccaaacaaaaaataaaataaaatgagagcattttcttcttgtcttcacctaggtagctgctttcctccagcccctgaaaatgtgactccttcataaaatcaaaatttatgattattcaaatgttggggactgtgaaaagagaggaagaaagagagaaaattaatattgcagctgttcttctgattaatgagagataattgctcatgaaaagtcacccctgtggcattttgttgtctcctggatctttgttcttttccactattattgaggactttcttgaagactaagcggttcttttcaatttttgggtattcagaaagggttgcctggttacagagaatggggaaatctcgggctatatcgggtaagatgtgccacagacagcaatatcacaatgccactcggagaaaaggatggatacaagttaacgatgcactttcaataaaacattcatagacttgttcacgctttgataatgacctcattaaagggagctgggggcaagtaagtcctgtctcctgtttgtgttcggctaacaaaacccagctttgagatcattcatcgctttggaaactaatatgaaatcaatgtaagaggagcaaataaatccgaggcggccccgccaactccccggctgtcccgccctgcctgcagcctccatttggagctggagaaccatgtgggcaaatgctgaaactaagagaaaaaaggactggggatgaaagtggtggtgggggaggtggggaggtttggaggacacagagggaggggcaaagtgggagttacagcctgaaaaaaacagctaagcacaggaacgggtcagaactctggggcctgttgaataagcaatgctaagtccctgccctttacttgtcctgactttgcccatgaaagcaaacaggaagaaagagaagtgagacaggaatgtggggttcaggtcaggtgccattccagagctgggaagaagtactggagaccttttggaagctagaactgagaatccaaatctcagggttgggctgaaaggaaactgctcacccaggctcaacttggagaatcgagagacaagaaggccatgcctctgctgttctttctagaatagctttgattttttttttgtaagttgagggtaagggtggagtgccttggccaggaggaggtacaaagaacaattttgttaccatcacatatgtgacactgtcttgcactcaaggaagacaaaaccatactctattgtcccaagcaagagggagataataaaaagatttcccctttcctttaaaagaactaattttctccttgaattatgaaagtaatggcttaggtaacagcctgtactctgtacccgactgcttaatacagaataaatccttccacgtggctcctggagttgtggcaattagagctcattataggctcataagagctctcattttgggggattacttaatggacgatgaaattttatcggacagaatcactgagaaataaaattgtgtggcggctcagacaccatgggcacacgccaatggtctgtctgttccctctcaggaaaagaaagctgaacttggggtctcctgctggttcagggcactgcactctggggaacagtagggctgggcagggctggggtggggggtgggcagtgctgccccgggggcatggagggtaggcttcctttgaggaggggataggcaggtagggccagataggggctggactcagaagagaaggagggagagagactggcagacactgagagatccaaagagaactagagaagtgagtcagagtggacagaaactgtgcaagaaatgggattccagtatacttgctcttggtgggctgaaggaattaaccaagtaccctaagggtcaagtttttcagacatggtcttgctttcagcctcagcctggtctgaaaccactgctccccttgaagtctttaggaaaccccatgagcccctcacatttctcaaaactccttggcactgaaaaatgaaagtttccacagtcagacacaaattgaataagatgcacaagcctccttgcatagttaagattctctaaggtaaaatggtctgcacatgggtgcgatttctaggactttagcataggagctcttcctctgaacacatcccaaactgctgggaacattgtgactcaaaccatcagcccaaaacagactgtggataacctgggacctaacccagaggaggaaaagagagaaagctannnnnnnnnnnnnnnnnnnnccagaggaggaaaagagagaaagctattattcttaaagagtatctgtatctatatctatatatgcttgtatagttgcaaagtgaatggggggaatcgagtcatctatttggacagtttaggactgtaaaaaatatcctgccattcagcagggtatgttttttattgccattctccatcagtggctccaagccttcttcttggggctgaaatgatttcggggattgcctagatcctccagtcatgaacaagggcgggctggggtgagcctgagcgtctgcagaccttgtggtacaaaagtagttacagctgagctgccccatgttaagccctgagactccttaattgttgtcacaagatgttggattagcacatttctggaatagctgtctgtttacactccagagacccaccgtccactaaccgctttctaattgaattctaatcacattcaaatagctcaataaccagcctcagctgcaattcataaaactttaattgccatccataaatcctgggctccccagagccgggcatccctacaacccaattacacttctctagcaggcaagagagactgtcacagagatggagaggggaagacagaggatggaaagatagagccgtgcctctagctagtgctctcctggatttgggcaccttgttctctcaggtggagggagtcctgtctctaagtttcttagcaccatcatgaactcaggattgaagttagctgctctggaaaaaggatcagacttctaactattgcccaaccacatggccccagcccgcttttctgcagggggaaatgaagagagaaaatggccacctctgctgccttgccttctccgaagataaatagtcccaatagtttggcagccaccctctctcgggcagtaaggggtgtgcaagacttccatggaccagagagagttcccttacaaagccacttctgccaatcagaggcaagattccctggatggctgaatcctcttcatcctttttaggttcttaagatgcagaggaaagagtgcttcctggttagccttgctaagctgcccatgattggtaaaaatgagggacaggaaatcctcagacccagagcgaaggtctatctaatccctgctgcgtctttaggagggcttggtgtttgaggtcctccctccaaaatcttcaggatggagtttgtaggattgccctggaatgccatggtgttactacttggagaaagaaaagggtgactcttcaacatctctctctctctgcggaagtgggaggtgccgatcagaaagggaaacaaggaagggtcgttggtctgagtggccccaggagggccccaagtacaaagacacttcagaccttgtcgaacatcagcatgaaaagcttgacggtttcttagctgggaggcctcacagttctgcgccggacagtcctgaactaaccacctgaatgacctctgccaagtccaaaagctgtggacaggggtaggtgtaaccgtggccagagctgcgctcagggactggacgactgccagtccgtcgcccgcacaatcctgctccaaaccgcaggcctcacacttcaccgcgccgcagccacccctaccacagaggagctggaaacactgagcattcctattaaataagcctccaagtccccacctggtacgctttgcggtggggcgtggggaagagttgggctgcggccagggtagcgagagggggtgggatggaggatgcagcgctgtgatttctcagtaaagcgtggagaaagagggggaggaggccggcctcccccgggaaattaacaaaacctacactttgcaaagtctcccccatccccctcccccgagttcttccccgccgcgcgcccgcccctcctcgcggcttctgttgtgactcgggcagcctatcccgagggtgcggagctgccgaggagcctgagccgagcggtactccgcagcatcacgtgccagggtggggggctataaaatacccgagccggggcgccgggcgggggacgtgaggaccagccctctccggggacccctttgttcccagcccagacgccaacacctctgcgtccccaagggcttgactgcccgtgtctgcgcggctcccagggcagagcttagaacactagaggagaggggtcgccgcgaactgccggggcttccagccacccacccctctcgacatgtcgcgctccttctatgtcgactcgctcatcatcaaggacacctcacggcctgcgccctcgctgcctgaaccgcaccccgggccggatttcttcatcccgcttggcatgccgcccccattggtgatgtccgtgtccggccccggctgcccgtcccgcaagagcggcgcgttctgcgtgtgccctctctgcgtcacttcgcacctgcactcctctcgggggtctgtgggcgccggcagcgggggcgcaggggccggggttaccggggccggaggcagtggggtggcaggggccgcaggggcactgcctctgcttaagagccagttctcttcggctcctggggacgcgcagttttgcccgcgggtgaaccatgcgcatcatcaccaccacccgccgcagcaccaccatcaccatcatcagccccagcagcctggctcggccgcggcggcggcagcagcagcagcggcggcggcggccgcggcggccttggggcacccgcagcaccacgcacctgtctgcaccgccaccacctacaacgtggcggacccgcggagattccactgcctcaccatgggtagggcggggtcttggggcacctgcgctccgcgcctttcgcgctcctggagcaaactttccacctccagtggaggaagtgggagcccggggacagggtgaagagagaggacgggcttttagtgtaaccgtagagtcagccacagaagttccacgaaagtggaagttagtttgccagcttctccactcagcctggtgcgttttactcctagtagtaggtgctcgagtattgccttattaatactggggccttagggacctcgaacgtcacggcggagaaaccagaggttaactgcttgggatttggggtgggtgtgtttgaacctgtgtggcatccccgcgtcggggcggctaaagcgtcttgacgtttttggctaagcctgcgcgcttctccgcttggctcaaagggaggcgatcagatagtgcaagcccccatccctctttaatcctgtgacttcgcatcctgcgcatcgaagacctttatttgctttgcacgtctcttttcttccccgctaagcaaccacgtgccttgaaatgggaaagggatacagatgttcggctgggcttccccgggtgggtccctgaaatgcgtcctggttagcacatggggtgggagcaccttgcacgagccttacctctctaccctctcttcgccggtccgcaggaggctctgacgccagccaggtacccaatggcaagaggatgaggacggcgttcactagcacgcaactcctggagctggagagagaattctcttccaacatgtacctgtctcgactccggaggattgaaatcgccacttacctgaacctgtcggagaagcaggtgaaaatctggtttcagaaccgccgagtgaagcacaagaaggaggggaagggcacgcagaggaacagtcacgcgggctgcaagtgcgtcgggagccaggtgcactacgcgcgctccgaggatgaggactccctgtcgccggcctcagccaacgatgacaaggagatttcccccttatgagggagggcctcctccctcacatcccccgctcctggcagaccaggcaacgccaaggcgtggggcacccaggggccagaatccttgctcattgcagtggtcccatctggagaagaaacgaacctggaagttctggaatggacaagccgggacctgacccttcgcgtctccttcttgacctgtttatctaggactccaacttgaagttacagatttttttaaaaaatgtaaataacctataattcaactcattcttgtcgtataacagaggaaaaacagggttggtttaagtttaacactgtatggggtttttgaaagcacatgtcagttccccatccctactctctttcagaactcgataagaacacaggatttattgattattttctgttgtcgttttcaaacaaaaacacccaagttgaaaataatttagaaaattagaccttgtaggtcttgctttctgaaatttcgcctggggagaatttaaaatctaagtcgctggaagtccctttgtatgtgaataggtttatataaaatttatatttatatttatttaaataaatgaaacaaaaaccagaattttaaatctgtggtgtttgctctccctatcttctcctgccccctcctccaatgtctagagaaaggcatatgcaggaaaaagctgtctgaggaattcgaggaaaatgttgagtaagaacttggtaatgtgggtctcttgactgagggagtttgtggctcaatgggttttctatgtaacagaactttcgccaaggagacacctttagtcatgatggcatctaccaggcagtgcctctccatccttaaaataggcaacctcctcacagttgataggacaaatcactccatttggaatgacactgaccattaacgacaggtaaacctttatttagcaaggaagggtaaaaatcccccatctagtttttgttttcttctttctacttcctcatttctctcagtacgaaaacttgaattatgtgaaggaatttgtagagtcagaatagttttaggaagagcaacaatccatcaaacaggtcagaagcaaacagtggaaacttaataacgatgctacaagcagaattagcgggtttccctcaatgttaagaaaacaaaaagtcagggacaggaagtattctgttcaaagatttataatctcactttttcaaagcagcccagagatgcctttagagctttgagttttggggctttttttcccggtcaccctaatattcagttaatttggctcccttctagtcccttccagcccaccccccttcccatagcctagcagaatcacttcctttaagcctggtcccagagaagacttatttctagctcttccctcagcagggcaactggctctctcctcagtgcggcctgggcttgttatcttagggagagaagtgaagaaactggaaacaggaaaacgaagagatctcattccctgcaagctgagccccactaatcctcaaccggtgtgatttctgattaggttctataaagacgccacccaataggttcaagccacaggagttaatgacaacacacatacacaagggctttaggtctgagttactagaggccggtcggactgaacctcaccaggtacggctggggttctaaaactggacacggttttccctgagtgttgtctttagcgcgcgcgcgcgcgcacacacacacacacacacacacacacacacacacacacacagtaggctcagaaggaaaatccctcttcgttccgtcaagggacatagggaggagggcccgcactgtgtgaggctgaaaagggagctgccggcgctttgtgcaatgtgctgagctctgtcctgcgcagaggtcccagacagccggctcactactgcctggcctgggaagctcaggcctctggatctctttcctcctgtctctcacgcgcagagctccgggctcttcgccctgcccgccacgaaagggaggaggcgcaggccggctgcctttccaaaagattctgtctcccttcttcccaagaagcaggcctctccgcgcgcgagaacagaggtgggaggacgggagtttgcaggcgcaaagaacaggagtttaagcagactatttccaccaggggaaataagaagcacaaagagcgcctgctgcagctctttgcgctcttgcccaaagctaagcttcctctgggctgtggggagactcctctggtccccgttccatctacccagcccggcccctctggggctcagcgcttgggtttagccctcccctatgtccatgactagccccgatcacagtctcttaagcctctcccggcccccggctcccaggccctgcggagccaagcacttggaacaccaggtaccgcgcgcggtggacccagctctgccatgccgcagatagccgcagtgccaaccctgtttagatggtttggatctgcttggatggccccagcccctcttgcttcgatctttggggaagttccctagggaaaggagaataaacaaagtatttctgcccagaggcaaaaaaaaaaaaaaaaaaaaaaaaaaaaaggcgtagcgatacctatttagatgttgggacactctccatagaagaaaaggttctccagggttcccagggaggtcttccttctaggacatccgatgcaaagtggactcctttggtcactttcagaatggagtatgaggtctcctactatgctagaataagttttacatgtttccctatccccactcctcaaaaaatatcagttgatgtttttgaagttttcaaatcggaataatgctttggtattttggagtcggtctgattctaaagaccaacagtttcactttagtttaagagcatttaagccaaccctcagaaactcacattctcagctaaataatcttgatatcaaacacccatttaagaggaaagtttaagatgtatggggtcacccttgacaatttctctacctgggaagcactagatactagtttccattatgccccacttgaaaaacagaaacagaactatgttcccccagagcatgacctcttagagaggtcatggaaagaaagaaagaatggaaagaaagagaatgaaaatgagaatgagaattagaaagcaggaacttgctccaccaagagaaaatcagtgggtagcacccgctgtgagtgtggttgagtccatctttttgagaacaagtctcatgttagttttaaacaggaaaagagctgggggtggaaggcagagtggagagcaggaaggatgacctctcacccatgtgccctggcccagcccagacattcagagcatagaggaggaacagagacttttccccttcactctcccactcagccaccaacaaatgcctaaggccaagggcctgatactgatagcaaactaggccaaaagcaaaagtgacccagtagcccatccttagggtgtcagtgggcctgcatgatggagacactggtgcccatagacctcttttcctctagggtccttattctgaagtggtcatcatagctcagtcccttccccactcccctaaagaatatctaataattttaggagagacaaaacacttggggatgtgaagtctttgatttctgacctccgcctccgtctcctcattgccaaccaccaccccgctaacccacaacgccccaccagttctgtccagttatatctggtcaggattagaaatgcagtttgcttggcacactctaactgtggtcagacaattgccagaaaggtggtggttctaactaaaagcagtcacagagggcaacaggggctttgtatgtacatgtgtgtagtgtgtgcatgcatgaggcacatgtgtgtgtgaaagagacagagagggtcctttgatggtggtgatgtaggtggaaaagagtaatttttaaccaggttttctttttctttttgtttcccacttatacctttcctgcaggttccactcgcttttaatggcactccttgagagatttctttgagggagatggggaggtgctcagtgttgggttgtggggaggaaaaacagtctgaacatggaggggagacatggagaagagctctggggcatgatctcaagcccagccttacgggtgtgagagaggggaggagaatgacactccaatagaacctatttgctagaggaaatcaagtttaaaggagcaatcactcctttcaaaagagctcctcccatcttctccaaacacagcccaaagctgtcctagacgatgaatgcagttcagtgcatcaaagcaattgttcctattttcattattcacaggaaatctttgaatgtacctgttaaggtgacagaccttttaaaagggaacatttttttccatgcaattaaatggtgcatttactaggcgtctattaacataatttaatataaatctattttataaatctttaggctcacattactgaaaattgagcttctcttaaaaaatgcccacatctcttccctaaactacatagaatagaacccaaaaacttgctattctaagccagctagaaatattaaaagtaatagaatcctttgtattgtcttttgttaatggtgggggtatgaagaaaaggggcaacttgtctcatagaaattctataaggacccgaggcttctacatccaacatctggcacttggagtgggcaacacaggctggaactaagggaggggccaaagaagcacagaacttaagacatctcttagaatcagacttgaatcagaactcagattaaaaaaaaaaaaaactaaaaaaaaagaaagtcagcaaaactccaacttgcaaagaaatttggattccagtttcttctgtttggggaaaaaaattctgaggcctgtgagacctctagtgctgctccatgtggcaatagataaccttgtctgttgccatagccagactacttattctcaagtgtaccctccaaaatcctgggcatcccattgtctctgaaaatagtgttttgtgctctcttaatatactgatgtcaatgccgcccttcggtactggacactgcttttcttcaagctgagccctatgttttcctgaacccttgctgtatctttgttgagccttctaaatcccaaacctaggaaggccccaggggctcccctgagtgaatcctaacagatcggaagtgtatgctgtgtgcttaggaaagtaactagtttcagattaatgaagcagtgacaatttcaatctgcttaaaggcggaggttggcactgcccaggcctgagcgtggggagctcgccaggctgggctttatattgtccccttttctgaagagcagacaaagatggatagagagacattgaaaagcaaggggagtatttcaaacagtctcataaagcaggctgtcactttaagacaagaaccatagtgctttgatgactttgtattagctgcaccatttcaaataggggactcaagtctctagtgagagggaggcaaggggagagaggagagagaagcagagagagagagagagagagagagagagagagagagagagagagagaatgtagtaatatttagcctgtgagcactgtggcgaaagtaattctaggcaactacttggtttctgaagttcaaggagaaaccacccacagcaggtgcagagaaaaaaaggcaggtgggagttgctcccgatgggaaagagctccctgcctatgagtggcagccggctccaaggagcagaagccagcttggtctcagtttgctgcgaagggatggagcagggtgagaagctctgcctgccccagaccttgaaggattataatggaaatttttgagagtgtgaaaaagaaagaatacgaaggagagggagtgcatgcttttggagacttccttcacaaaccctaatttagattgtttggggtcaagcagcagccagccaccttcctcctttcctccttaattaattaataagaatgattaattattaggattttgaatgtcaaggcttcaaaatgcctttggctagaggctgatgagttgcttaagccatacatgtagttttaacttgggataagggagttgagactttagaggtgtgtttgctgtcactctgtctttttttttttttttttttttttgcctttgcatctgcttccccagtgatctttctctgtctgcatttctctgtcttgtctccatctccttctgccttgatatccgcccccacccccaccctttgttctcctggccgttttccccatccagtctcccctggccatggctcaatcctcctagctctccggggaaagaggaggatgctaaagctgccattcctacttgggtatctactgcgggcacaggcatctcggaatcccactgcatcatcggtggcaggaagtgggtgggcattaatgtagtttcactcgctggatcgagagttattgacagcttagattttcttttttctgcttgtcaaaaatttctttctctttcttttcttctctttttttctttttttttttcttggatacgggaaccagaaccacgaaatcctgcaagctttgaaggccggcgaaagggctcccccgtcggtggcgccggagggagaagcgtttagtcactgtttcattaggcactatttgaaccttgcaacatgtggtaatttctggggcaagctgaaaaggggggattatgtaggagggacataaggaaattagccaacggttaatttaactcgttttctgctagacttttcgatacattcctaattgactgaggggcaggtgaagctcccgccccatgcaggctcattcacggtgggaataaatggctctttctcaactcacactgctcacaatatatcatcagggaaaagacatgcaatgaatatgttgattttttttattaatggaattacaccctgccatgcaggtgtgagggtaaaaacctatactgcaatgaaataagattaacaatgaaattagaattttattagctttatatgtcacacagacctggatttgaactgtcaaaacaagcaacaagaaaagatattctgaacgcagccctgtcaatcaaccaggagaaacgaacagcgtggtatcgaaatcataatcaccttccagttcttcagcgcctcacttgggccttacgtgagaagcaagtgggtggaggaccccgcgtgggcaaaggcctggtctctggacctgcagatagtagatgaaaaacaccacctgggttcggtagacccggcctaaaaaaggctcgggtccaggctagaagggcctggatggcccgaggcctccaagatatcagacggaccggctgggcacccgcggcctgcaggccatatttcgcgtcctccaaatcagctgcctagggcgggccgtgacccgagggaattggagagaaaagtccaaacgctgggcgagaggcggggtagggcgccctttggaaaccgccctgggttttgttactccggggcccccggagcttcggcacagctacctgggtctggcaggcgcagaggtgccgtatgcaaatggttcactattaggcgagaaagaaatacttcaaatggccctttgtaaccttctatagaaaatcgaggtactctgcatgacaaagcacaattaagctttctattcaggagttctgcagctggtagcccattgggaaagtgggaggaaacgcgaatatattaatagtgtggcgaaagttttttgtgtgcgtgtccttttctaggtcgggggtggggaggggcggtgggtggacgcagagggaggaaggctcagccttggatccttgccacctgaacaacgtcgcctctgcccacgtggaaagcctcgcttgtctggcagccggggttctgaatggttgccgcgacccctgcgctcccagcagggccaagaggacctcgcgggcaccagcgtccgggcgggaagggacgtgtgcccaagcctcgcctcctggccctcagtgggctgggacgcccttgatcaccggcgcaggaaagaggctccccagcccgtgagcttcgtccgggcgccagggcagggatggctggtggtgtgcactggagagcacgacggtgacgctgcgtgggaaagagacgtgggaagggcatagccggattatccactcagctccaattttctccaagcgccactcaccccacagttgaggttcgcttcccgattgttcatttgtagagtctaaagggaaagaaaattttgcctctgaataaataaagggcccttaaaaccaactctgctgattatcctgcgttttccatctggatccatttcaccctcttctgccctgctgggtgccctcggacactgacctttgtggacagtattagttcctttatcaactgcgtcgctggcaggcgcttgcctctggcttccatttgcatttggtgaataagtggcactgcaaataaccgaacaacctaaggatagagaactgcaggtatattgtttctgggaatgttatattgttccagttctggcagttgctgcttctctagaaattctttttctctttgagagcctattttcctaggctctggcttttaatcagactccccctgtgccttcaggcatgaagtggaaatgccttctagtttctgctagtcccctgggtgcatcaaaattcttgttagttccattagccctacacacatctctgcaaatagtcgctttgttgaaaagtgtctttaaaaaccctagctcacattggttacctggctcctgatcagccatgttatgtttaagtcaatcccttctataacagccagctcaactgtcaccatacttttgctgggacaactcctgtgagaggaactccaccctctaacccatttcattttcagacagctttgaccattagaaactttcttgtgttggattagaatcttcattcagtattttttatccattgggtcctacctagttctttctccatggaacttctaagtgtctgtcttctccctattcccaactgtgaggacattgatgacagcaactgcatctttcatctctatatccttagcattcatcacaacgcctagcacctactagcagatgcccagtaaatgctagctgggtcagtgcatcatcttacttccaagtctctaccagttgcatcaatcatggaggacttagaaacagctatgatgaaatatagcttgaagatgggatatatctataggtgtgtgtatacacatgataaatatatgtaaatgtttatataggctaaatatcatgtacataaggtaaatatattgagaagtttctggagacaatctacgtgctttaccatttactagcagtgtgacctcgggcaattcacttcatccctctgacttccacttgcctcatttgtaaaataaggataattaatagttgagaattaaataaggacattgatagttaaataaggaaatagatgtgaagatatatagctatttagataaagtagccatggaaggtctaactgaaaaagtaacttttgaatagagacctaaagagaatgtggagaactgatcacatggcttgctggagcaagagaattccagacagaggtagaaacaagtgcaaagacgtagatgggaacatgcctgcaaataaaaaatatgtgggtaaatataaaagatgtttttaaaagatctcttttaaagataattgaatattttaaagcaaaaatagtaatatattgtggagtttataacatacagtttttttgttggtttttttttttttactttttaaaaaaaaattagagatggggtttcactatgttgcccaggctgattttgaactcctggactcaggcagtcatcccacctcatcctcccaaaatgctgggattacaggtgtgagccactgtgtctgtctcagctgattctttttagtcatgatagttatgctctgtaaagttgttgaaaatgatgaattagtgaacactgaacattgttcacaggggaaatacagagttagattctgtaaacctctggttgcaacacttttgtcaagcaatcaacacataaccttgttttatgtgtgtctctatttaaagacagcttatgtaatatatatcattgatttattaacatggagctcacagccaacatgtctgaacaaagctcatctaacacacacataaggcacatccatgtcttctcgtactaggaataccagatataattttacaattgcccctgggagccatttttttatggtgaaaaatatatatggcataaaatttactattttaattatttttcagtgtacaattcagtgccattaagcatttttatattattctgcaaccaccaccaccaccattacccatctctagaacgttttcatcttctcaaatgaaacctccatacccattaaacaataactcccctgtcctgtgccttctgccctgacaaccaccattctactttttgtctctatgaatttgagtactctaggtacctcattgttctgtgaaagggctgtatatgcaaagagatccccaaataccaaagaagtgaagaaatcaaagaaggaagcagacaaatccagtttgttggtatgagattatttatcaggggaatt

SEQ ID NO: 976 - DNA, 1812 bp, Homo sapiens
cggcttctgttgtgactcgggcagcctatcccgagggtgcggagctgccgaggagcctgagccgagcggtactccgcagcatcacgtgccagggtggggggctataaaatacccgagccggggcgccgggcgggggacgtgaggaccagccctctccggggacccctttgttcccagcccagacgccaacacctctgcgtccccaagggcttgactgcccgtgtctgcgcggctcccagggcagagcttagaacactagaggagaggggtcgccgcgaactgccggggcttccagccacccacccctctcgacatgtcgcgctccttctatgtcgactcgctcatcatcaaggacacctcacggcctgcgccctcgctgcctgaaccgcaccccgggccggatttcttcatcccgcttggcatgccgcccccattggtgatgtccgtgtccggccccggctgcccgtcccgcaagagcggcgcgttctgcgtgtgccctctctgcgtcacttcgcacctgcactcctctcgggggtctgtgggcgccggcagcgggggcgcaggggccggggttaccggggccggaggcagtggggtggcaggggccgcaggggcactgcctctgcttaagagccagttctcttcggctcctggggacgcgcagttttgcccgcgggtgaaccatgcgcatcatcaccaccacccgccgcagcaccaccatcaccatcatcagccccagcagcctggctcggccgcggcggcggcagcagcagcagcggcggcggcggccgcggcggccttggggcacccgcagcaccacgcacctgtctgcaccgccaccacctacaacgtggcggacccgcggagattccactgcctcaccatgggaggctctgacgccagccaggtacccaatggcaagaggatgaggacggcgttcactagcacgcaactcctggagctggagagagaattctcttccaacatgtacctgtctcgactccggaggattgaaatcgccacttacctgaacctgtcggagaagcaggtgaaaatctggtttcagaaccgccgagtgaagcacaagaaggaggggaagggcacgcagaggaacagtcacgcgggctgcaagtgcgtcgggagccaggtgcactacgcgcgctccgaggatgaggactccctgtcgccggcctcagccaacgatgacaaggagatttcccccttatgagggagggcctcctccctcacatcccccgctcctggcagaccaggcaacgccaaggcgtggggcacccaggggccagaatccttgctcattgcagtggtcccatctggagaagaaacgaacctggaagttctggaatggacaagccgggacctgacccttcgcgtctccttcttgacctgtttatctaggactccaacttgaagttacagatttttttaaaaaatgtaaataacctataattcaactcattcttgtcgtataacagaggaaaaacagggttggtttaagtttaacactgtatggggtttttgaaagcacatgtcagttccccatccctactctctttcagaactcgataagaacacaggatttattgattattttctgttgtcgttttcaaacaaaaacacccaagttgaaaataatttagaaaattagaccttgtaggtcttgctttctgaaatttcgcctggggagaatttaaaatctaagtcgctggaagtccctttgtatgtgaataggtttatataaaatttatatttatatttatttaaataaatgaaacaaaaaccagaattttaaat

SEQ ID NO: 977 - protein, 322 aa, Homo sapiens
RRGVAANCRGFQPPTPLDMSRSFYVDSLIIKDTSRPAPSLPEPHPGPDFFIPLGMPPPLVMSVSGPGCPSRKSGAFCVCPLCVTSHLHSSRGSVGAGSGGAGAGVTGAGGSGVAGAAGALPLLKSQFSSAPGDAQFCPRVNHAHHHHHPPQHHHHHHQPQQPGSAAAAAAAAAAAAAAAALGHPQHHAPVCTATTYNVADPRRFHCLTMGGSDASQVPNGKRMRTAFTSTQLLELEREFSSNMYLSRLRRIEIATYLNLSEKQVKIWFQNRRVKHKKEGKGTQRNSHAGCKCVGSQVHYARSEDEDSLSPASANDDKEISPL

SEQ ID NO: 978 - DNA, 1278 bp, Homo sapiens
cagtggcggcggcggcggcggctcggcaggcgggttcaggcttcgggggccagccgccgccatgatcctgctggaggtgaacaaccgcatcatcgaggagacgctcgcgctcaagttcgagaacgcggccgccggaaacaaaccggaagcagtagaagtaacatttgcaggtgaatgaactcagaggaatacaaccaccctttctacaacaagagtcctcgacaagatgatcttggaagacttttgcagctctgaagtgctgttacctggagatttcgatggggtcctctatcatatttcaaatcctaatggagacaaaacaaaagtgatggtcagtatttctttgaaattctacaaggaacttcaggcacatggtgctgatgagttattaaagagggtgtacgggagtttcttggtaaatccagaatcaggatacaatgtctctttgctatatgaccttgaaaatcttccggcatccaaggattccattgtgcatcaagctggcatgttgaagcgaaattgttttgcctctgtctttgaaaaatacttccaattccaagaagagggcaaggaaggagagaacagggcagttatccattatagggatgatgagaccatgtatgttgagtctaaaaaggacagagtcacagtagtcttcagcacagtgtttaaggatgacgacgatgtggtcattggaaaggtgttcatgcaggagttcaaagaaggacgcagagccagccacacagccccacaggtcctctttagccacagggaacctcctctggagctgaaagacacagacgccgctgtgggtgacaacattggctacattacctttgtgctgttccctcgtcacaccaatgccagtgctcgagacaacaccatcaacctgatccacacgttccgggactacctgcactaccacatcaagtgctctaaggcctatattcacacacgtatgcgggcgaaaacgtctgacttcctcaaggtgctgaaccgcgcacgcccagatgccgagaaaaaagaaatgaaaacaatcacggggaagacgttttcatcccgctaatcttgggaataagaggaggaagcggctggcaactgaaggctggaacacttgctactggataatcgtagcttttaatgttgcgcctcttcaggttcttaagggattctccgttttggttccattttgtacacgtttggaaaataatctgcagaaacgagctgtgcttgcaaagacttcatagttcccaagaattaaaaaaaaaaaaaaaagaa

SEQ ID NO: 979 - protein, 275 aa, Homo sapiens
MIDFCSSEVLLPGDFDGVLYHNPNGDKTKVMVSISLKFYKELQAHGADELLKRVYGSFLVNPESGYNVSLLYDLENLPASKDSIVHQAGMLKRNCFASVFEKYFQFQEEGKEGENRAVIHYRDDETMYVESKKDRVTVVFSTVFKDDDDVVIGKVFMQEFKEGRRASHTAPQVLFSHREPPLELKDTDAAVGDNIGYITFVLFPRHTNASARDNTINLIHTFRDYLHYHIKCSKAYIHTRMRAKTSDFLKVLNRARPDAEKKEMKTITGKTFSSR

SEQ ID NO: 980 - DNA, 1268 bp, Homo sapiens
gaccgggcttgtcggtgaagcggcagtggcggcggcggcggcggctcggcaggcgggttcaggcttcgggggccagccgccgccatgatcctgctggaggtgaacaaccgcatcatcgaggagacgctcgcgctcaagttcgagaacgcggccgccggaaacaaaccggaagcagtagaagtaacatttgcagatttcgatggggtcctctatcatatttcaaatcctaatggagacaaaacaaaagtgatggtcagtatttctttgaaattctacaaggaacttcaggcacatggtgctgatgagttattaaagagggtgtacgggagtttcttggtaaatccagaatcagtcttctaataggttgtctcaacattcatggccagaggaattgaaaggcaccgtgtcatccttgaatagaacagctatgttatactgctttaaaaaggaggtttaaagtggaaaaactgaacagcctttttaccctgtgattcagtggcatgtctcaaattctgaggcatttagcaggaccccaaagtgagaaccaggatacaatgtctctttgctatatgaccttgaaaatcttccggcatccaaggattccattgtgcatcaagctggcatgttgaagcgaaattgttttgcctctgtctttgaaaaatacttccaattccaagaagagggcaaggaaggagagaacagggcagttatccattatagggatgatgagaccatgtatgttgagtctaaaaaggacagagtcacagtagtcttcagcacagtgtttaaggatgacgacgatgtggtcattggaaaggtgttcatgcaggagttcaaagaaggacgcagagccagccacacagccccacaggtcctctttagccacagggaacctcctctggagctgaaagacacagacgccgctgtgggtgacaacattggctacattacctttgtgctgttccctcgtcacaccaatgccagtgctcgagacaacaccatcaacctgatccacacgttccgggactacctgcactaccacatcaagtgctctaaggcctatattcacacacgtatgcgggcgaaaacgtctgacttcctcaaggtgctgaaccgcgcacgcccagatgccgagaaaaaagaaatgaaaacaatcacggggaagacgttttcatcccgctaatcttgggaataagaggaggaagcggctggcaactgaaggctggaacacttgctactggataatcgtagcttttaatgttgcgcct

SEQ ID NO: 981 - protein, 186 aa, Homo sapiens
MLKRNCFASVFEKYFQFQEEGKEGENRAVIHYRDDETMYVESKKDRVTVVFSTVFKDDDDVVIGKVFMQEFKEGRRASHTAPQVLFSHREPPLELKDTDAAVGDNIGYITFVLFPRHTNASARDNTINLIHTFRDYLHYHIKCSKAYIHTRMRAKTSDFLKVLNRARPDAEKKEMKTITGKTFSSR

SEQ ID NO: 982 - DNA, 170279 bp, Mus musculus
  misc_feature (1)...(170279): n = A,T,C or G
agctaatactttgctttgtccaagttttagtcaaacttaattctaagatattagatgttgcaccagcgtctgccttttttcccccctgcatcctcaacaagacaaatagccgataggcttttcagaaacattggtggaactagaaagtatccttattggagggattcatttcttttccttgctttgaaaaaaaaaaaaggttagaatttgtctcatgattataatgttgtacatctatgccttttgccatgtttatgtaatgatgtatatgtgtatgctctatctacctatctatctatctatctatctatctatctatctatctatctatctatcaatggaacatatatgccatctttcacttcttggagtacaaatatggtcctaggactcaatacatattaaatattgaggttcttgagagatccggaagtccccttttaagtttgtcttccactctacctgtccaggaccaggatttacttgttacaatggcatattctcatttctatacaacagaagagtgtgagtgtagtctgaccaggctaggctctttctgctgttggcttctgtcacagcaacatttgcctggtgaaggtagttcttgggcttgcttagaacttcactagaagaggggaagaaatgagaagatagaaaaatgcatcatataaatatatgaagatgtcagtgaacaaatgaggccctttcagtttcttcatctactgttgtcttattagcatagcatacaggcctcagaaggctcttgcattcccattattagtctcagtcgacattaccttataaactattccatcctgggtcccatccccatttccatccacagactaactggatgcactcaatgaaggccaaagaaaaagaaaagaaacactccctttgtgatatgtcctgttttcacccacacagagaagcaagagaacaaaatgtacagtgcagatcctctcagctaatcaagactgttctctctggtctagctgtacgcagagcacagtgactacacattcacctatgagggcacgccatcaggtttattcaaattctgatgatccctcttgaatttatgtagtgttcaccttttgtaactaagtttatttatttgaaaactgatatatttttgttacttaaacatactaattttatatttttcctgagataaaatggcatttatatagcaaaagatatatacattgtataagtactttcttacaaagatttgttcactaataatcgaatctgtattcgaaggtaaaactttgcagtggtcaaatctgtttaaatgaaaatgatgtaaatttgttaatctgattttacttcattagaaccactaggcttccagaaagaatgtaaacattcatatgtctttaaatacaagttttggcatataaactccaaatgctgctaccctctgtcaggcttgctgctggacaacagctgtacaggcaagcaagaaatcacagtcgctgtcagctcccacaatgcatagaggccctggtcgctgagcaggagtggcttgtccttttgaccatttggattaatcaccatagctgcaccaattgcaacgaacatggagatcaataagtaaccatcaaagagctctgaaataacaataacatttagattgtctgtgcagaataactaaaccaagacagagaatataagactattaattcttaaattttagccttccagaccaccctccaaattaattggtaatcagccttacattctgtccctcataccttaccttttaaaattataaatgagtacaaaaatgattataaagtgaatttttaaaactttagttggagttgttgaccataaagacagtgaatgataactgtaagtttctgagtacaagctctttcataattgagttgtgggggcaatgtttccttgaagttaaatgtatgttgtcttttagacattagattgaggatcatatattggactggactttgataatccaagactttaaggatcactgtgagtacccatgtgcagtaatattcccatcaatctatgttcataatctacattttaaaatcaccatgtgacctgctttattgtaaaccatccacttagagaagagctagaaataagtgaatcatctgctcttgtggtccctgtacttcactgacttgttaaatgtaacacagaaattccacagaacttatgggcaaagttttactatttcccccagtggagttcaattttttttttttttaactgtcaaactgggcagttttattttcctttacaacttagtaaatacttgatgactgcacgtggggtaaggctgctcggtggttcagaaagaccccagggacggtgttttcctgacagggtgtggtcttcagtagtgagtggaatgacatgtatgagtgacgtcactgtcagaccagcaagaccgcatttatgcacccatcgttctcaggattgttggtaacttgggcgtactttccccaaataaccttgcctccttgtgtcacaaggcccagctcgctcacattcacttcaataactgtacctttggtgatcacccccagggttgtatataatggggatgatggattctttttcacaccgagaataggcaggcaaaaggtagctttcagctcagggtgtgtgacatgggcttttttgaaacgtagacccataggcctaatgaatctttcatatttaggtggttttcttgtaaagccatcaccaacagagcagactttagtaaccgttctcttccatgccttctttttcctttttcctgttcgaataactttcaatacttctgtttccccttgggcacgaactttgggtagagggacctcccatttccccaccttttctttccgtttctgcttaatcatgttagaaaggacttttgctctcgactggccctctctgtccagcagataggcggagactgctccctgcggcgtcttctcttcatccttctgcttggggtttctcttctcatgcatcttaatagtctttttcatttgtattttctcagcatggcgctgtttatggtagagcttagccttcaggccaatcatttttttttgccttctttgaacgttcatgggcctcccaaccttctttctttctctttttctcatggtagtccaaacgatatccatatcgtttgcggtgcaattcaatatattcattttgtggcatgatgacagccgcggagcaccggtctgcgacctcccgggtctcaaaaaactcttaatttctggatgtcactggtccacgagcctgcctcattcagcccgggacgggaaagggtagtccttttcggagttcaaatttattaaactattattttagctctgtagctaacatctggctttcagcatgacactatcaatgaaaatttaacttgatgttaagaattctcttgtatgtagaaaaacttcagtgggaaaataaaaagagaatagatataaataatagaacatttcaggatcaaaattttaggaaaccccagaagattcattagtgtctgtcttcatgacaaagctatattctgtatatactctaatttttccagctcattagtaacattaataacattcctgttttgcatagctggaggagcttttagaatttctgcctaaggaactacctttaatattcataagatccaccagagtaccaaatttcatctggtcccagttgttacaaatatactaccatagatgagctgaaaatcagaggcaacaggaaacagacctggaaaaggcttcagtgtgcaaggtcagaagcttgtctataaaatgcaactttgcatataaatcaaaattatcttacccttgtaagagtatttgatttactcattttcctgtcagtttatccagctaaataatatcaaaagaagcaggaagccaaagttcctgagaactctgatagaaggctcaacagtctgtagtatttttttttttgcaagttaacctgagtttctgatgcataaccactgtacataaagataattttgaacatttcttggatgtttataaagttctcaatcctatatattcatgtatcatatttattgactttcatctcaactaagggcttattttcagcctgtctttctcacatatctggtaatcttttgagatgctgtttgtcatggtttcgggactacagactggttctagtaacagctttgtgaagaggcttgagatgctattaaacatcttggtataatacacagagcatcctcatatcaaagaataattcaactgcatgtgtaatggcacagaaatagagacatttctagtccacaaaataaataactatttgatgggagtgtttaatctaatttggagggaagaaaagctttacataagaggtgcaggctttaattttagcacttgggaggcagaggcaggtggacttctatgagttctaggacagccagggctacagagaaagcctatctcaaaaacaaacaaacaaagaatagagtagacttatctaaagtcacacagctaagtaattgatggcaccaggtttacctttcaaacttagcttttgttgccttaaaactcaagtgacttttatatactctagtacagtttccagagaaaaattggtaactatgagtaaattctgtgtttcaatggaaatactatcttattctgtatatcagccatactatcaggctcctattttctgaaagcttaaacagcagctactcatacctgagtggctttagattccctctttaggatgtcatttcatctactggatcagtaactacaacacagaatgattgcttggttgttcttgctgcattacttaaaatgagttaaaaacaaacaatcaaatgaacaccccagaagacattatttctgtctccatttctgtggaagttctatatgaataccaaatgtgtgtgtgtgtgtgtgtgtgtgtgtgttttcatgagtgtttataaacagatttgtcagactagctgtactgttggcatcagaaaacatgcccaactgatctgactatgtaacaaggcccctcttgccttaaaacagcttcgtaagactgggatatgtatttgcactgagggatccccggggcaaggtatggaaaagctgtgactgcccctacctcctacttttaataagtttttaagcatagccatcctgtccatgtgaaactaatgaggtctgctttctctctttaggaattttgtcttcctatgaagaaactttttcatccttctacttgcctagatttcagtatatccacgattgctacccatttatgataaagatccttcaggaaagattctgatacactcaaattaagttgaacgtgatggatcagagtgagatgtagtataagtacactcttctgatctctaatggggagcacctgagccactttctagcaggtcaagaagcatgtgacaggaagcttaggtcatttgtggaaagcacctggcacactgctggcacactttaagaggtgccaagtagacatgggctacttttgtcctcctttctttcttttcatcaacctttcccacttcattccttcctctttttctctttcagtcctctcagtatactttcaaaagtatgacatgagagtgaatattactcatctatactaaagaacagctctccctaaaataccagtcaaccctgcagatgaatgtgcaactattaagtgctagggcagacaaaggctgcttagctccacattgcattctgctctttcattattactgactgatcacactgtggctaggactgagagtgtgggacaagctactcaatgctctgccctgaaaagcatcccaagccacctgtgttattaccaatctgccaagcaacttaatttgaaaattaataaaccattatttctcaagttcttcctctgcagtatgtgatattagttagctttacatgagcatgtcataaggattaaaagaggcaaactacactgtaatttactcaagacatatggtaaatatctaatgaatggaagttattataatattatatgatgatatgactggtatttgaatatcttaaagagaaaaatcagcatatcttggaatcaccctttttgtttatcctaatctgttggtttcttttgaggttctcatttagagcttcagtcagaatcttacctatatctgaatgtatttcctgatatattttcacatttgtatcaggcatgtatatagatataaattctgtatatcatttcttaattatttcacttggacttgtctaatttgctgaaatctgtccaaacaagtttggactgtgatgttttacgataaaaatctagggtggatatatactcttagaacggattatactgcttacagaacatttatcaaagatatataacccttgtggcttcttggtctgtaggtttctgcttttccatcttattgaacagctgtgtaagttttgacttcatgagactaatacgaggagaaaggggttgtgagagaataggaatgcatggtgggagatttgattagaagtaatctttcacactgatggggctgaaggtttgggaccacatctgagtttgaatccactaatgtgaacatgtacttcaatgcttcattacctagaaatggcataataggcatagtagtataggcacagttattgagtgaatggttcctggaaactgcaaggacttttcactgtccttgctagaggaagcagcgtgagatcccctgcagtcgtgcagcttggccagtttgatgggctctgaaacttaattcttcagttagtgtcacgtgatggtgaaaacaaggaagaactgataacaaatttgtttcagaatctgtgtatcatatgtgatgggtcacactagcatttacaaacaaaggtgagggtggggaaaggataaatcaagttcagtcacagggatgtgaaaagtcaaccgtgagaaccaagtttcaatcttgtcatactggagagagaaaaacacacaaggagagtacttgaaaatgataagtcagaagacatagaaactttcctgtagtgtctatctgtaacaacttcatctttgtgttattttttctttttaaatcaaatttggctactaaaaattaaatgtctttacagctatttcaaggtaaggaaaaagctggtgtagatacaggaactagagctataaagcctcttggccacaagattcattaatttaaatttattttcttatcttagaagtattatgaactatatattttacttgtgtcataatttgatgcccacaagtcaaaaattagataattcacaagtaaatacccttgcttttttttgtttgttttggtttttcaattttgtattagatattttcttcatttacatttcaaatgctacggtgaggcaagaatcaggcctcaaaactttcaaactctaattttggaacagtcagccctaaatgggatatctctatcaaatctatcaaacagtcagccctaaatgggatctatcaaatccctgccttcgggggtcagggaacccttcagaagaggcagaaagagtctaaaccagagaagatggagaaaatcatgaagacaaggccctctaaatcaacatggtcatagcccatatgaacgtagacactgaggaagcatgcatggagccgttatgacaccagatcctctgtgtgtatattatagtttccagtttagcattatttgtgggattactgagtgttcgaacaagtcactctctttcttatgcccctgtttcttatgggctctgtttcttttctctctctctctctttttttttaattaggtattttcctcatttacatttccaatgctatcccaaaagtcccccatcccctccctcccatcccctccccccctcccactttttggccctggcgttcccctgtactggggcatataaagtttgcaagtccaatgggcctctctttccagtgatggccgactaggccatcttttgatacatatgcagctagagtcaagagctccggggtactggttagttcattgttgttccacctatagggttgcagatccctttagctccttgggtattgtctctagctcctccattgggctctgtttcttatgggctcctttctgattgttttgtccaagtctaatgtgtttttaacttttattttattttattttattattatcctttagaagcctgtttgtttcctaatgatggatagaaagggagcgatccagatgacactggagatgggaaggaactaagaggaatggagggagggtaaatagtaatcaggatatattatatgaaaaaaaatgctttctttatgtgtttgtttgattttggtttttcaagacgtagtttctttgtgttgccatggttgtcctggaatttgctctgtagaccagactggcctcgaactcagagatctgcttgcctatgactcctgagtgttgagttctgggattgaaaatgtgcgtcaccactgccgggatagaaagaacgttcaattttcaataaagaaaaaaaaatttcaactctattttaacttgctttggcaaaacagggtttagatatttaagtgttgactctttacaacccagcagggttttgtgttggacacacatttctcacaccaaaaaccttggaaggaaggtgcacagcttgggaaacttccaaagcctccagggagctaaagactcaggtttttctctctgtgagcttgagtgactaggacacttttgcttcagtgactcagaggcccttttagtgtctcagtcaagatattttgcttagcagactagggaaaggaaaggagggtcatttagtttagactgtccacctgttgttttttagcacacacacatgaaataccacactgcacactgagcagggcccggaggtaaagggccctctttgctctctttgtccttgaggactttggctgtaattatgacacagcagggcattgtgacatatatgtacgacacacatgtacctcataagggaaagtagtagcttccctttccttggtaggacctttgctgtaattatgacatatcagggaattgtgacatatgtgtatgacacacatatacctcataggtatttgtgccactatggctactctagagccttcagtcaacagagcttaggtcttgtccagctcttgaagggcttactgaggtggacacctcagagtactgtggaacttgctgcttcctgagtgttctttgatacaaaagagccacattttcatctccttttcaaaatggatcttgaaaagttaactgtaactaagccaggagctaaggagacaggagaaagagggagtgaaagagaagaaaaacgaggagagaggagtgaaagggaaagaggaaggggaagaaaagaggaagaaagagaggaaagaggagagcgaaatgaaggagaaagagatgaaggtggaggaggaagaggaagagatgaagaggaaagagatgaaggcaggggaggaatgggaagaaaagagagaggaacagaaggaggagaaagagataaaggagaaagaggagaagaggaagggggagaggaagagggagagggaaagggagaaggaagagaaaggttccaggaagccaaggagatcagtgagtggtctttatttccacgaaagaagggttctaagtcccgcagattggccacggtttacccgggcccagggtcgggcccgcagtctgagccggtgttgctgtggctgcctgaaggtaggcacgcggggggctctggagggcgggcgctaaggccgagggccagggaaaaggtggcgccggcgggcgggcgggcgggcgcggggcgcgctggaggaaggagcgcaaggagcgcgcggggcgggcgcgggcgcggggcgtggagagcagcgactgtgaggctgggctaggcagcgctggctttaacctgggcggcggaggcgtggggaagaaggctgaggaaggggaggtgtgtgggacccgagtgggtggggggaattggaagcaaatgacatcacctcaggtctgagtaaaagggacgagccaaaagcattgacctggtcctggatatccagatgtcgagtccaacctgaacttagccggacacagacctcattgcctcacggagacatcatgcagaagtcgcctttggagaaagccagctttatctccaaactcttcttcaggtgagagggtactcagcggatctttgcacggacacatgtgcctatgcaggagaagggaatgaatatgggcagactttgggaaaacaggaagagatttttgttgtgtttgttttgttttaaaaggtgtgttgtcattcagtgctttaaaggaaataagcatttttgtacaataaaatgaagctgattgaatagagaacaaaatatacttgcaactgtgaatcagacttgcaacagccaaatatgctacggagcaatagatatatatttttttaatttcctgaaaaaagttatacttcataagtgtacttaatagaacattcctaagattggtctgttattttctccaagaaaagctgaccgcaagtgcagtgcctgtgtaataggtgctctgaaaacatttgttgactgaatttttttaaaagtccaggaattatattgtatttactttttgccgttgtaatattgagtaagtctaacatgctcatcacagttacattattctttttaaaaatgagcaagtcagttaaaatatctaactttaaaaagaaataatataagcaatgcattaaaaaagtgagttaccatggggatatgaaactagagttttagccactgaagctatattcaattgacaattaggacattgttctcttatcctacattgtcaaaaaaccaaaccctcaatctaataggatttttaaattagaatttaagttggaagacctaggcaagaattaagcgctttgtatttgaagtgctccgtggagcttcgtctgctctgatcctgtagtgtgaatgaatgaaaagagcagcgctcatgggtcctcagctgactcaccccccccccccacacacacaccaatgagtcagcacactgaagtatcataagtgtcgaatatgttctcaacctgccctatgctgtgggtagggggcaaggctcagccttagtcttcctgatgttcctttttcagccggtctagagctcaaggctgaggaaagacaagtgcttctgcaggagagctccccccggtggttgggagagaaggaagggctttcttctttagaatgaatatttgtggtgccttttgttacttcatctataaatctagcttatcggtctggatctattttcttattacttacaaaatcagaatgtcacttgacatacatgtgaggcttttatgaaagcctattgaggaacctaaatgtcaatgtgtctgtaaaggcaagttttcaggagaatgaatatctcttgtgtggttttcccactaagtagtaagaaacttcaaaatttttcacttatcaaagtgtttcaaaaatttcccgtttttataacccacctaataaattgtagtgtgctttacaaatgttcttaggctgatttggaaaggaaatgtattataatggctgtgaaatttgttaagaacatactcatttctgccctccaaatgatttcataatcagttgctttaagaataggtgtgtttttaagagtttagttcctactatttataggaactgacatttagctaagtactagtcagtgattataaacttccttctggactttaattttcaaagagtaaaacccttttctccactggactaggcagtgccgcctagtgaccagggcagtgggccctggattcccatggcctggactcaggctgcagatctactgcttagtaggcaagccctttggtgtctctgcatgacttcagtgctacaacttggagtctgtcagtgtgacacataatgtaatgggttagtctgttgaggaatatatgctgtgctttgaggacatgttagctgcccttactgttgtttacatgtttacattcctcgaagtgctgggatcctcactgtaaaggacagtgagtttatttctgctgggtgcacttttgtgactatagcctgtatctatgccatttgcttgagaagttagcataggggatagatagcctcacgtagcatgggcttgttagatacttagatgaaagccatgctcttacatcagatctccttcagtgccttagaatttaacctatcccatcaagcttagggttataaaagactcctaaaagctgacttctatgtgtctactattatggtcttggttttggattatattaattaacattttaattatttagattatgttactgagaaaccaaaacaagtttaataataatttaagtactttttatttttttaagttttcagtaagtaaaaaaatggaaagacattggaattggtctaacacagaagataattttaccatgaaaatttcaagtaattttttttactttcatggaaaataaatgcattaacttgaaggtgtaatgataacatttatgaaataagttgtttcaaaacaagtggtgatatatttatacagaatttatgattgacatattagtggaattaattcctaaaaacctttgatttgtagaaatgtttgaactttacactttcatagagatttaagaaaaaagattatgcctaacgtgtacctgttagtgtgtgtgtgtgtgtgtatgtgcgcgtatgcatgtttgtatgaccatagagtgcagtataagctatcatctcttgagtcatgtctctcattggcctgaatctcaccagttatgttagacagacttgccagtgaacccaagggctttccctgactctaccttctcagcactgggattacaatcttgtgtcactctgcccgccttttcacctaggagcttgggattgagctcggttcttcattcatgtgaagttcttctctgactgggttatgaacagtcccaagaaattgggtagcaacatttccattctgtttgtgatccatattacagagattatacttgacaaaacttaggttatccaaatctgaaggccacttttgatatactgaggatatggtatttagaaaaccaagaattgctgtcccttcagttgatggatgtcatacagtggccacagctccagatttcatttggcttttctttaatagaaatgggaagaagccacatctaggatggagagaccctctgtttggacagtgtacaagcactgcccgatactggctctgtgccagcaacttaggactcccttctgtttattttcttttcactgataatgtttggttgttacacagctcagaaatttcaacttgggatttatgttaggttcatgtcagttttgtttagtttaatcaacagttctaagagcacctcttgtacaggacatgatgaaatcatgattttgtgtatgtgcatatatatgtgtataataaatatctctatacagtgaaatttattttagttgatatcacaattattaaaatttattttaaggttttatagcacattactacacaatatattttgatagtcaattcctcagagcagaggaagctattatcttaaaaataacttcttcaacattttgtttgatatacgatgaaatactactcagtgcacactgatatacaagggaaatcaaggctttttgttttctttatggaagtttgacttaactgtgataattcctaagtgttaaaacatgtttaagaggtccacaaataaatatcaccataaagtatgttattactgttaatgccctttcataggaacctgtaatttcactgcggtagcactatagataagtataggattgccaaaccataagggaagggcggtaaccatttagcatgcagtgagatattatttgttgagactttaaaaacacatctgagtcagcagagtttgggccgttttgatttgctcttcaccatgcatcttgtgcatttcctcagagccaagtctgcaaagcagtgagtataagaggcgaaaactatgaaagaggtccacttatttggagatactaacagagggatttcataaatacatttttcatcatcagtaagggaaacattttaatggcttcccttcagctcttaagaatggaatggatgcaccatgtagggttttctttgtaaaatcagcattacaaagtggcctcttcatggacttgattgtcagagaacttaggcttttagcaagaatactctagtagttcagatgaggcttgtcaaaatgtcaatttcagtataagccattaattaattatcttttgacattaatgactatttgaaattgtaaactacttttgtgtttagtattcacatcatttcatgactccaggattacatgattataatacctgtttcttgttgaaattgtctcacaatgctaaacatcatctatatgcagtatacatacatactctaccctcaaaataatgggacaatcattttgatacaatgggtgaggggaaacaactgttgacacattttttaatagagtaagtattccttcacattttccttgtgatgtttatcatataaactcttcagaaggcagtctactttatgactccttgttctagggcagtagttctcaacctgtgtgtttcaagggttaaatgacccttacacatgtgttgcatataagctatcctacatatcagctcttcaccatacaatgaataacaatagaagaattagactcatgaagtagcaacaaaaattatcttataatttggattcaccataacatgagaaactgtattaaagagttccagcaatagaaaggttgaggaccactgcgctagggtaagggaatggtttggagatttttgaagtctttagcattgttagacttcttagcttggaagatattctcttgatatcataagattagctgtcctccccacccaagtcaaaggggtatttccccagtatttcctgtaggtcatgatgactcagagcaatgtttggagggcaatttcattcactcccttttcaccaccaccgtactccatgcttggcattaaggtggtagaggcgctgccctctgaatgaatgaataccttaaaactgatgatctcaagccacagagatccctaacccatactcgtggctgtctagcaaggtttgatagagaagtgttgtataggaattgcaagaacaagtgagagaacagcagtggttcagagaaggtctggagtctgtcctgaaagcatgggacagaacttgggggtagatctggaaactagcaagggctagacccctgggtaccttatatatttcttagggctttattgcactgctcatgaaatgaaaggtgggaaattttaagcaggcagagatgtgattatttcaagattgttggcgtttttttttttgtttttttgtttttttgttttttttaaagactgacagaagggatagagaaagatgcctgaaagatgtttgggaagcaaaataatcatatttttaaattagaggtggaaggtgagagtgaggaaaaaataagagggcttggatgggtcagtttgggtggtagaatggtaggtgatacatactatgaagtggggtccttctattagaggcagaggcctggtgtgaggttagatgcctatgcaagactgcagtctctaaaagaaagtgcaactggcttgaggtgggttatacagtttgaatgaattctttgtcttgtcaatactgtttttcaacaaataataattagtcagaactaatattttatttggtagtgctaggcaccaaacccagacccatgtctatattaaagcattctcctactaaactgcaccccagccccaagtaattacttcttagcagagaaattcctagcacttagttcagacagatttgccaactaagaactcacatttgcttttctactccattacacctgacatttaatagtcactgttttctttacataaaaatattggtctctccctctctctctgtctctctgtctctctgtctctgtctgtctgtctctctctctctttctctctctctctctctctctctctctcacacacacacaattaaaagccatcatggatcagtgtcagtgatcgagtaagacattaggtattcccataattcagtgcatcaagtacataattacaatgagacctaaaaaattattcactcttttaagagtttatagacctgttgaatttaagagtccgagatagcaatcccaatagcagggccaaggatttttgcaacagaatttgatgaaccagataggcactataagatgagttcattatggtgaggataataaccttgaaatataaatgtgactttttagtgatgtgttaattatttatttatgcaagcctgtgtatgcgcatttatttgtcattactagtgagcctctatacttaccaggtttctaacagttaacagtcttagactctatataagaatttattaaaaattctgtttattctgcctaaagtttcattgtattatttttaataacgcaacctttttttctttgtaataagatggctatcacattcatttataggttctgtaattatattacttagtttaattagactaggcattaattttgattcataaaatcattgactgtttaaagtagttgatatataataaaatattacagttaaaaatggactttcttgaaaacaaaaattattgaatatttaaaaaaattaatgaaatctttcacctgtgttgttagcaaaatgtaacttcatttagaaatgtgtaatgtgttagtagtcctttactcggccggcccatggattccctggagtatgaaactgctgacttgttggcacaggtgtcatcggagccttgagagccaggtgctttgctgccacagaaggggagcagaagcagtctcttgtggttcactctccttttgtcaccattgtgaccactgcttctgcagagtgacatcagacacagtccagtggacttacaactcattagtaaagcagtatgtcagggctctgcacttaatggaaacttgttcagggttagtggtgtggtaagatggaacccagctgtaagttgtaatattttattatgtatcaactactttacatagtcagtgattttataaatcaaaattaaaacaggatgaggagattcttgaaattagaaccttctacttcacaaacaacagccatttctatagcttttctttactctgacaaatactaagtatctatataggttctctgtggaatatagcacacacataaaatggaaaatatattaaatatgccaagtcctagatcccatgtgtacctgttaattaaatttatgggaaagaacaacttctatgatctcctttaacaaatgctaaggtaattcttctttttgctaacatctaaaatcatcaactcaacgataaaacaggtttggataacccaacaggtcttcattgggctaacatcctcctcctcctcctcctccccctcttcctcctcctcctcctcctcttcagtaaattaacaataaagacacaaaaataggtcaactcggaattctgtagttttgcctctatcttccagcccttattaagtacactcaagagattacatacattatctcagtgaagtttttaatctgtctttgataattgcacatataagaaatgtggttttaggggactgcagtttagcagccaccaagctaagagatgtgatgtcagatgtatctttagattggtgtaaatccagacataaaattttaatcaatacatcacacacctagaatagaattgatcaattatttcacatggctttatatatactttaatgttttttcttgggtctgaaataattttttactgcatttgtttatagacaacattaaacaggccatcagttagtcttcttggaagggcttgttgctttaacaacaacaaagaattactttattttatgtgtacagtagtttttccagcttgtttgtttgtgcacattctgccagtggaagccagaagagggtgctgaatagactggagttgcaggtagtggagagacatctgaagatgctgaaaactgaggtgagggcctctggaagagcagctcttaagcccatctcttctctgagccatctcttcagcccatttattcagtctgtttcttagcataggtctttatgacatccacaggaggcaggatggaactttcctaaaaataacaatatccttatagtttactttcagtattatttgaaaacaaaacaaaacaaaacaataaaaacagacaatatagcaggccagaaaacgtggcagtagctaaacattgtcacagtaacagctcagttacagtgagtgtgattccagctgtgcttcctgtcctgaataaggtagctaagtactaggcagtgccttttactcagccccactttcctactttccattttctctctaggataccaagctgggactttgagttttcacctcctaaccctacttcccttcactctctaagcacatcacagccatctttggcatctatgccagcattaccacccagtacttgttctcatcattcatgtcatctgatttttctattggtctttcttcttatccacctgctaaggttgcaggaagtggtagagacacctgatagatggttcttcaattttatacttgtcactttatatatacaaatttcagattttcttcatatggtagtatctatagttcttttagaaagtgcttttatcagtaagtcttcatggaatttaaatacttcatgaaatttctagtgtaaacatgtatgtatggcaataaaagaattgcttttccacaaacaaaaagatataaagtcccaaataaaagcaaaacatttatataatattttaagcattattttcttgattcccttttctgtgttttacacaattatatacttctgaaattgaattgtcttataattgatttttttcccaaacttctttctggccatcagatccaggaataaattattatcaacacataaaagttgcatatttcctgtatcctgtgacttcaagtgattttttttttttacttttggcattaatttcacccaacaatgttgacttttaactttgattgcttgatattccttgagaaagagtactttatgatccagttttggaagtatcaggtaatgtgtacttggatgcttgtctggcatgctaggcattgtaattacagtagacattcaccaagtttagtactctaccttaacttgaaattgtacacctgtcccagaggtgaaggggttctgaaggcagatttacactataaacctattcatagattctaaagggcaagagtgattcagaaaactaatttttacttgagtatgaaaatggcttaggctaaaactttaattatggttccaaaagtaataagtacttatataaatgattatataattttaatttctaaaaacagtatgtcatgtacattttgacagtggaagtgttggtttaatagtgaatctcataatcagtgtcaccttagaatgaacataaccactttattttaaaaacatgataatgtcacctatggtttgtcacttatcacttcctaggggttttgttgccctgggttatgctgtgatcttgtgtcaacaggtgtactgcaggcatgctaggctgttaactgagtttggctcatatgtcctatagggacatgctcacttatgcactgtagagataacagtaaatatcacagtaagtttcaatattcaccaaaaaagaaatgtccggtgaagttttcctatttgtaggactattatgggactaaaattatcatatatttaagaatatgtaattttttattccttttattcctaaaaaaaaaaatgaaaccaactcagtcactttaaaagatatacatttcagatcaaaattttgtggggtgtgtctggagagtggcagatattaggattcaagatttcaaagacattgaaggtagattatgcttatcttgattgtgcctggcaatttttgagtcccatgcttcatctccccatgcttttagaaaagtctcacatttagcttctctgtcagttcttaggaaccagcgtgtagcggaagaaatgtgcactttggaatcaggcttagctggagtcctcattctgtgacttattaacgtgtgttcttaggcacttaatctttctgatactcaattattctcactgggataatgagttactttcatttcaacctggcctaagaatataataatattcaatattctctgagtacttactctgtatattagagttctcctgagaataagaatcaatagtaaatctatttaatatataagattatttataaagaattagcttccgtgactaagaaaactgtcaagttcaatacttgcagggttgttttcaaagtggagactgggaaagctaatattcaggtttgagttcaaaagcagtcgccaggagttcggtgtcatttggggaggctggtctttttttttgtcagactcatgttttcagtggattagggaagacagcttacattagagagcatgtagtggtgcacagacatctggcttcccttgtgatttccggaacagaattaacacaaataatagaacaatccataacaggagctcaacctgctctaacctaaatgctctcatttaatgttagtctgacctccaagtatcttatcaattgccatagccatcacccctgtgaggactttctgtgtcttcagtgataagtagtgcaagatacagaatgcctctttaataagtaaatggtaacagtcttatgaacactaaggcacttaacacctttccagtgtgtaacagactagctcgctctttcctacatctaacattcctctcctagaaagtaggcacaacatgtcactgaattataattctctttcccaaaatcccttgcccagtctacaagttttgtttaccatagactttcatcctcaattgtgtgtgtgtgtgttcattgctgggtttgaactcctgggtaaatgcagcatactaagcaaatgctctgaggcactgagttacacttccaaccctcatcttaaattttaagtttattttaagcattcaggctactctttttgctccgacatatttcctttctgtttggggcccatgtgtttgcagaggctgctatcacatagtatataaactgaatggattagacactcaaaatttatcgttatagttctaaatgctacaaggctgacatcaaggtgttagttaattgttttttcccaagggatgtgagtgagaatctattctgtgctttctggcctagcgtttgtcagcatgctggtggggatccttagcattttgagatctgtagaggtatcacctccagaggcacccttttcacagatttctccttgtatcttcagataaatgtccaaaatcaattcctttgtaaggaaaacagtcatgttgtctggaacctactaaatgtgtttactccacatgttttgagggtcataggttagagggggtgggtgggtggatgagcaccttcatagaagcagggggaggaggatgggatagggggtttccagcagggaaaccaggaaaggggctaacatttaaaatgtaaataaataatatatccaataaaaaagtaaatacatatatatccttaaaaatatggagacactacagaggacactgtaagacgggataagggaactatctagggagtagttcatgaatctttagtatatctttagtatatctgtactaaaacattaatgaagatcaaatattgagaaggtttagataatgaaaaatatttcataaaattttattcaacaaaattaaataaattcttggttgaatatttagtattgtgggccattaatgatatgtaaaatgaacatgttatctctgaccaagtacaaatcctcaatgtttacattacattcttgtagagttggtttttcttttctcctttcggtgccttgaccagaagtaatgaataagcaaaacgtccttgcaatcagtgtccttagggtgccataaacatactatgtttgtggaattaattactaacagatcaattcaccaagtttctaatttgctcagtgcaatgaacaggacaatgaacataggaagataaattatacactatgttgtccttatgaatttaatcttgtgaggaaaaataagcagagtgaaatatcttaacttttaaattcaacaatttaaaatattaagtgagaattatgtgccatgttcagtggacagtgcagagtagacagtgcagcttaaacagagctctttatgcaatgtggtatacagtttagtgtacttggggacccgtggttgataaagggaggaatagagaaaggcggggtagggtaggacagtgtacacaggagactgattaaccagactggagagagagaggctcttcctgaccaatatcaatgcactaaaccttcttagaaatagaagtcaggctttgtttcaaggaagctatcagtttttattcagtgtaactcagcaaaatcagagattagcttgctcagtgatggtgataggaaaatctttttaaatattaagagccaccctattatcagtgttttcatccagttgaactcctgcagagttcaaaagctggagagtctggctcaatgtttcctttaaagttcattttcttaaaacctaaatggaaacaaaagatcatgacatcttgaggaaaaaaggaaaacaaaacctttaaatagttataaaaataatttttattaatctaccatggtttgtgttaggagctatccttttaagtacctgattgctaagatggctaacttgatctcttaaattgcttattagaaacaatgaattaatcactattatttatatatgttatagtcttgaaaaaatcagcaattttaatttttgacagatcttaaaaggtttgtattaacatgcattgctatgcttaaatgaacataaaaatattaagtagagacttaaagtaaggccttggagtagttttctttcatggcaaatcctggactaatctggtcaacaactccattccctgctgaatctcaattttccaaaggaatacgtggtgagaaagggtgaggacgagcctctgttttcctctcctgcagctctggggagcttcagtgtttgttcttagtgatgccaaggtttttggacaatgcaaatagaaatactttgcctcccaaattcaggaacaggatatgaaccttatagtccgagtcatgaactgtgcctacttacatcctcctcagcactaaaagggaaaaggcataaagatttgaaacttccatttcaatttgttgcataatagaaggtaaaaaggattaaaatgacattaataaacaaatttcatatttaactgggaggtaggaaaatatccacagatgagaagcccaaatcaaatgccacaccactcttctaatcccactggggattcacagtgggtatcagtgccttaaaagtggcatcatacttaaacaaacttggggaagaggaggttaagacaatgaggaaaatttcagactgacttatcagactagttgattgcatggagaactatggaaactatgtttaccacaaactgaagtttaaccttgtcttcctggtaccaaattacttcttctagaaaacattaacattcttattgtgtatacatggaatgtgttttgattaaatcctcctcctatctctttccctctcatatatcctcttcttcctactacttttgcctcccaacttcatgtgctcttatttatttaaatttaatacccactgaagccattcagtactgccttatatgactatatgtgcatggagaccatctactaaacatacgtatccagcctttcaggaatgggcatccctgaatactgattctcccttccccagcagctacggattcccaataacttctcagatagagctaagacttcatgagtcccttcccagtccatgctggggttttgactggcttaatcctgttactattttcatttaaaaaatgatatagatgcctctaatctctgctgtatcattttatctgccaagcaaatctatcaaatgagaaaatgatctcaaatgatgtgggcagatgcattttaaaattacatttgtgtctttgtgtgtgtgtgtgcacatatacacatgcacacacacactgctgtgtactaatgtatggaggtcagaggacaacttgtaagtcagtcctctctttctaccatatagtttctatgtgttgagcttaggtcatcaaacttgacaccaactacctcctaagccatctgctggtcctggaatatatagaagtcattttgatgtaatgaatgacaaacatctatcaaaagacaaaaagaacttctttgtacacatagtgaggagctattaaatgatttagatattgaagatcacgagaagttgtactttgtgttttatgtgccatggctcatgccagatgatatctgtaggaatctaccacctgtccagaacctcatagaagttctttgtctctaagaaataattatgttctttatacatttggggaaaaccttggagagtcaagtaggtatgcttccaaatatttagtcactgtcagaatgacagtcatggctcagtaaaggacatgcttatttccgtgataaatgaaaagtattgaatttgggtctttgtgatgccatctgataaagcaaaatgaacaaagaaccacaataaaggatacaaagttctagagaaggggagaaaacactgaaataaatcgaataattatttttaaaaaagcagcaaggaaatgcgtatctcccatataggagatgtcatgaatgccacttgtgcacagtcaagtctttcagttgcctagtcagaagccgggaggagcttatgcccatcttccactttcacacttccgtgaggatgcggtgagagtgcttctgacctctgtgttccaggagatgattcaacactgcacagagggtcagttccctgatagcacagaggtttccatctgaaagcttgcacacatgcctgtccataactnnnnnnnnnnnnnnnnnnnnacatatacacatgcacacacacactgctgtgtactaatgtatggaggtcagaggacaacttgtaagtcagtcctctctttctaccatatagtttctatgtgttgagcttaggtcatcaaacttgacaccaactacttcctaagccatcggctggtcctggaatatatagaagtcattttgatgtaatgaatgacaaacatctatcaaaagacaaaaagaacttctttgtacacatagtgaggagctattaaatgatttagatattgaagatcacgagaagttgtactttgtgttttatgtgccatggctcatgccagatgatatctgtaggaatctaccacctgtccagaacctcatagaagttctttgtctctaagagataattatgttctttatacatttggggaaaaaccttggagagtcaagtaggtatgcttccaaatatttagtcactgtcagaatgacagtcatggctcagtaaaggacatgcttattgcacacatgcctgtccataactcaggagcattgctacggtaaaactgcaacaccaggctgtttcctgtcttccttgttcttttggtttcaattatatttcttattgatgatgaaaatatcgctcagtaatttgaaagccattgtttcctcagaagtctcctaaaaggaaactcgcatgtaggaaataagcagcttcatggggcaattactactattttcttggatttggtgtaggtacagtgatatctgtagcttcacagaaaggcacttaggctgctttttcagaggacattggtacttgacagtaaatgacatcctttgtgtcttatgttacctcctaagatgagcaggattcctcccctcccttcccttcctctcccttcccctcctctcccctctgacctcccttcccacttcctctcccctcctctcccctcccctcccctccttttccctccccccttccctcctcttcccttccctttcctatttccttttctatttttttcttgtagctgttgcttgttgtctttagattttagaaatgctcgtgtcctctcactgccaacaaacacttcttcatttctatacaatataatatcacaatgccattttttcccctcagaattcatagtagttccaaaatctaagtttctggctttgagagaccggaaataaacaatgtataacattcatgttaactgatcccatgagttttttacacactgtgatatcattgtcaggagccatcagaacaactgcgtatgtgaaaaggattagagtttgaaaatcaccactggaaagtttcaccagttctacaagcatatctatctcacttagaaaacccttccagcaccaacattgatttctcaacccttcacactgcttttctaacttatagctttattgaggtagaatttacacatcaaacagtttacccatttacaatatacaaaataatgaattttaagcatatttataattttgttaaatatcacaaaataaatgtaggaacctttattcatacaaagaaagaaagaaagaaagaaggaaagaaaagaaagaaagaaaactattcagctttctcatgcctatctgcagatctgtttcaagggccttgtgtacttgaagcagatagagccacctgggaagagcctacactgagaaactggcttcatcagactggcccagaagcaaggtcattggttttatttatttatttatttatttatttatttatttatttattttttgtgtttttgtttgtttgtttgattaatgattcatgtggaagaagcaagcccactgtagacaatgccattcattagtaggtgaccttacaatatataagaaaggaaatcctataagccatagagaacaaacccataaacatactcctccttaggtcctctgcttcgattcctgtctttaggttgctgtttaagttagttactgccctgacttccattcatgataaattgtgatgcacaagtgtaagcttttcttcctcaagttgcttttggtcagtgtcttaacacagtagcagagaaacaagctctatattttgcctcccacttcttgttctaggcaactgttagtctacttctgcctttatcttgttgcttcataaaaatgaaacaattcagtgttttgtgactggtcttgttcaatggttcaaaaagttgacactattattacatggttcatcacttggtttagggatatatatgttgttaagtttttacttgacagttaatgttttttaaccatttgcctgttgtaaatgatactcatatgaatatcatttgggtattagtttttatgtagatgtatgtttttatcctttggggtatatacctaagagtggaatgggtaagtcatgctgtaaatttatgcttaatattttaaatatcttactgattattttccaaaatatatacacaaatttatattcctctagcagaacacagggttacaattttccatacatttgcaacgatttgtatgtttagtttgttgttattacagcgattctaatgggtataaaatggaatctagctgtagttttgaattgcattttcctactttgtaatgaccatttcatgtgcttactggtcatttatgtaatttctattttagataaatttttatccagctcatgtaattttaaattttggtttatgtctattactgagttagaagtcttttatatatctgatattaaaaccacttagcagatatttgacttgcagaaattatatagactatacactattttctttattgtatattttaaaggataagaagttttattcattttatccattttggttattgttgtttatgcttctggtattatatttaattatgtgctactttttcaaattagttatgaaatatggcaaattagacaaataagctttgatattacatgcctatttttaaattctaacttcacattaacaaattgcttaagcatcactagatccagtttcatatctataacatggatatgtaaggtctgtgcccagagctggtccagtgccacagtgctctgtacccaaatactgtcaggagagagctggtctcccaggagtgccaacacacatgtgaacacaggtaagaccaccacttttgattaaattcctggcccaaaagggtctcgcccagagccatcaggacacaggaaccaaggaacagctggggacaggatccttcagtttctgtctgtattctggagcttaccttgtgccacagctctccataaccaaattactccaggagggaactcccaggagtacagacacacaggtttgaaggagggacaagccacagtcagagacaggaaggccagctaacagcagagatatccagatggcaagaggcaagggcaagaacataagcaacagaaaccaaggctacttggcatcatcagaaaccagttctcccaccacagctatccctggatactccaacaaaccagaaaagtaggactctgaattaaaatcatatctcatgatgatgataagcgatgttaagaaggatataaataactctgtaaagaagtacaggggaaaacaggttaacagctagaagccttaaagaggaaacacaaaaattccttaaagaattacagaaaggccgggcgtggtggcgcacgcttttatcccagcactcgggaggcagaggcaggcggatttctgagttcgaggccagcttggtctacaaagtgagtgccaggacagccagggctacacacagagaaaccctgtctcgaaaaaccaaaaaaaaaaaaaaaaaaaaaaaagaattacagaaaaacacaaacaggtcaaggaattgaacaaaaccttccaggatctaaaaatggaaatagaaataataaagagatcacaaagggagaccagcctggagatagaaaacctaggaaaaagatcaggagttagatgcaagcatcaccaacagaacacaagagacagaaaagagaatctcaggtgcagaagataccagagaaaacattgacacaacagtcaaagaaaatgcaaaatataaaaatctaacccaaaacatccaggaaatccaggacacaatgagaagaacaaacctaagaataataggtgtagaagaaagtgaagaatcccaacttaagggccagtaaatatcttcaacaaaattatagaaggaaacttccctaacctaaaggaagagatacccataagcatacaagaagcctacagaactccaaatatattagatcagaaaagaaattcctcccatcacataatagtcaaaacaccaaatgcacaaaacaaagaaagaatattaaaagcagtaagggaaaaaggtcaagtaacatatacaggctgatctatcagaattacaccagacttctcaccagagactatgaaatctagaagattctgggcagatgttatacagagcctaagagaacgcaaatgccagcccaggttactatacccaacaaaactctcatttaccatagatggagaaaccaagatattccatgacaaaaataaacttacacaatctctctccacaaatccagtactataaagggtaatagatggaaaactccaacacaaggagggaaactacaccgtagaaaaagcatgaaagtaatcttctttcaacagatccaaaagaggatccacacaatcataaaaataatataaagaataacaggaagcaacaatcactattctttagtatctcttaacatcaatggactcagtttcccaataaaaagacatagaataacagactggatacatacacagaacccagcattttgctgcatacaggaaacccacatcagggacaaagacagaaattacctcagagtaaagggctgaaaccaattttccaagcaaatggtcccaagaaacaagctggagtagccattctaatattaaataagatcaactttcagcaaatagttatcaaaaagaataaggaaggacaccccatatgcatcaaaggaaaaatcaaccaagaagatctctccattctgaacatctatgctccaaatgcaagggcacccacattcataaaagaaactttgtactacagctcaaagtactcattgcaccccacacattaatagtgggagacttcaacaacctgctctcagcaatggacagatcatgggaacagaaactaaacagagacacagtgaaactaacagaagttatgaaccaaatggatctaacagatatctatagaacatttcaccctaaaacaaaagaatatactttcttctcagcacctcgtggtactgtctccaaaactgaccatataattggtcacaaaacaggcctcaacatatacaagaagagtgaaataatcctgtgcatcctatcagattttcaacagcaacaaaaataacagaaaacccacatccaaatggaatctgaatgttctagtcaatgataacttggtcaaggaagaagtaaagaaaaaaaattaaagactttttagagtgtaatgaaaatgaaggcacaacatacccaaacttatgggacacagtgaaagcagtgctaagagaaaaactcagcccccagtcccttttaaaagaaactggagagagcatacactagcggcttgacagcacacctgaaagctctagaacaaaaagaagcaaacacacccaagaggagtagacggcaggaaataatcaaactcagggctgaaatcaaccaagtagaaacaaaaagaactatacaaagaacaaaatcaggagctggttctttgaaaaaaaatcaacaatatagatgaactcttagccagactaaccagatgtcgcagagacagcatccaaattaacaaaatcagaaatgaaaagtgatataaaaaactgaaactgaggaaattaaaaaaaatcatcagatcctactacaaaagcctatattcaactatactggaaaatatggatgaaatggataattttctagagagatgctaaatacctaaattaaatcaggatcagataaaccatctaaatagtcccataacccctaaagaaatagaagcagccattaaaagtttctcaacagaaagaagcctaggaccagatgggtttagtgcagaattctatcagaccttcaaagaagacctaataacaatactcttcaaactgttccacaaaatagaaacagaaggaacactacccaattcattctatgaagccacagttatactcccttggagatggaatggtttctgtctaatcaggaaccggtcacaatttcataagactataaggacttcataagagattttttccatttttatcatatttaatgttacaaatagatttttttaagactggctgagtgcatattacttttagcttcagatgatatcgtgtatatttaagaggcattttgcaattatagattattttgatgacttaaaaatgtcaataccgagttgtaaatattaaaataaattcctacccccacagtgacacacctacttcaacaaggccatacccctagtcactgctcatctccttaattggcttatttggacaggtggctgagccttgtatttagcaattgtggagcagggacttccaccctcaatctctggcaacacatcatttcattattagaaatgagatgtcatcctataaaaaattagagttttcacaaagaaatggaatgaactaagctaaacagtcgggttaatatgtgcttgtttaaaaactaaaatactagcatttttcataataaaatctgaagcttttcatggttaagtgaacagaacagtatatcgaagatactaggttttttttttttcctgtgaatgttagtgaactcttaaaaatacacacgagtctgctaacttatagttgattagctagtttctgttagaagtagccaaaattttggagaccactatatttttgaggaataccattttataagtccattgagtatatacatggctgggtatgaatcaagatgcataaagtcacttggatatgaggtgaagagctatcagggataatggaaagacagaaaaggagatcctcaatgcattgcctcccgttgttccaagcgaaccaccgagactcatgaaatgcctgactgactataaattccttgcctgaacattactgaatttacacaagttcactgaatataatcagaatcactgaaaagaagaatggcttgaatttcatatcattattgcaaagtgtctaaaacttgaatgcctgtcttttaattttttaatttttttttacttttgttttatatttcttagactgacctgcagttgacagagagaactcactggtaggagacatttggtttgatttattggtttaatctcaagatataaaatctttctcgaagatgactctctggtgattgcatagagctaatagattttagtttttaaaaattctttttagacttataaagtatatgatgagtgttttgcctgtatgtaaatatgtgtactgcacatgcgcttggagccctcagaggtcaaaacaagacatctgatcccctggccctggagtcccagatgtgagtcaccatgtcggtgctgagaatcaaaccctggttctctgtaagagcagcaaatgctctaaaccactgatcatccctcctgtccctatattttagtttttataatttactttgaaccagtttcaacttgggagcataaatataggttcattttattgtaacttccaaaaagaaatgctaactaataataaaatacaggtggtgagctgtgtgatgtgtgggtatattatatcaccgaattttattttgccttcagtcgttgatctaaggttctcttgttaaaactagatgtcactgtataacataatatcttaaaaattctgagatagcaaagaaggtttttataaaagcatctcacacattgtgttactttgaaatgagctggaagctcatttatggggatggccactatattttatacatgagccaaaagaatcatagttatattttttcaaggggataagatgatttcaaatttgcctctaaatgctttttgaggcatgggtttggaggacagtaaaattctacttgcttaaaaggtgatgtgtccaagaaaatcaagaagaaggaagaccaacgcatgcatacttcattcctccttagggaacaaaatacccatggaaggagttaacagagacaatgtttggaactgaaacaaaaggatggaccatccagagactgcctcaccctgggatccatcccataatcagccaccaaacgcagacactattgcatatgccagcaagatttttgtggaaaagaccctgatatagctgtctcttgtgaggctataccagtttctggcaaatacagaagtggatgctcattgccatctattggatggaacacagggcccccaatggaggaactagagaaattacccaagagctgaaggggtctgcaaccctataggtgaacaacaatatgaactaaccagtacccccagagcttgtgtctctatctgcatatgtatcagaagatggcctagtcggccatcaatgggaaaagaggctccttggtcttgcaaactttatatgcctcagtatgggggaatgccagggccaagaagtgggagtgggtgggtagaggagcagggcagggggagggtataggggactttcatgatagcatttgaaatgtaaatgaagaatatatctaataaaaattgaaaaataacataaaatgtgatgtgtcattttaatattttcaaatctattgcgagcacaaggcttctggtaggtggaattcatctttaaactgtgttctaaggaccaccatccttcctgtcccatcccatcagccgtctgagatttccaatctcggccagtcgtcaacacacgtgaatctttctagctgaattgaactgtgaactagctgctaagcacagccgtttttaaatttcagattgtagaacctaaattatgatatggtaaacaaaggttaaagaggttgtcactttgcatttattttgtaccttgctgttatggtattaagggcatttgtgcttgctgtctctgaggaggtaggcatactactattttatgcaggttagtcctcttcccagttctcatctgtagtagctagaagctgatcatggaaagagtccttataaagcagtgactgctgaaggtcatgagtcaggtttgcttttgttttctggaaaggggtttattatttgtttacagatcacacccccaccctcagcctagtagttttcagttcccttactttaatctaagtttgtgtcttattttaatacaactcactctacctacttttgtaaagctgaacatggttaaatgaattcagaagaatgtgaagaaatctttgatgttagtaattcagaaaagttttgtgcctctgagtaccatttcctaaccctggtaataaagcaacagcccttttgtcctgtttgcctaacaggaacttaagatgcaaataaagtgctaatggtgtggaatttctttggcaattgctaaatagatactttaaaaaaattgtagtaaactcttgctttaagtttatggagaataatagcccaaatcacaacatcccacaaggccatcttccttttacctcctatacttattgccagnnnnnnnnnnnnnnnnnnnnnnnnnnnnnnnnnnnnnnnnnnnnnnnnnnnnnnnnnnnnnnnnnnnnnnnnnnnnnnnnnnnnnnnnnnnnnnnnnnnnnnnnnnnnnnnnnnnnnnnnnnnnnnnnnnnnnnnnnnnnnnnnnnnnnnnnnnnnnnnnnnnnnnnnnnnnnnnnnnnnnnnnnnnnnnnnnnnnnnnnnnnnnnnnnnnnnnnnnnnnnnnnnnnnnnnnnnnnnnnnnnnnnnnnnnnnnnnnnnnnnnnnnnnnnnnnccttcctttctttctttctttctttctttcttaattttttattagatattttcttcatttacatttcaaatgctatccccaaagtcccctataccctccccctgccctgctctccaacccacccactcttgcttcctggccctggaaatcccctgtactggggcatatgctcttcccaagaccaagggcctctcctcccattgatggctgactaggccatcctctgctacatatgcaactagagacatagctctagggggtactggttagttcatattgttgttccacctatagggttgcaaacccctttagctccttgggtactttctctagttccttcattaggggccctgtgttccatccaatagctgactgtgagcatccacttctgtatttgccaggcactggcatagcctcacaacggagagctatatcagggtcctgtcagcaaaaattcttaggcaaatggatcgatctggtggatatcatcctgagtgaggtaacctaatcacaaaagaacatacatgatatgcactcactgataatctggtattagcccagaaacctaggatattcaagatacaatttgcaaaacacgtgtagtaccctttcttagatgatgccactagaggcactacaccattgtggcaccattttcctcatgcatccagaccactttcataaatattcactactttttccctctcacaaaatgaccagtgaatcacagtgagctgtgaagatatctagttaacctttgtcaaagaaggcttttgttaaagtgtaagctttcaagttaaagggagaaagtgacacactaaaccatagtcaatcactaatgtcttagcaaggaatagataataagtttacttagtcttatggattgacctaaatttagattagccttaaaggcaacttacagaacaattaaggacatagggctggtgctagtgatcaagccagagatggaagtagtgtaaagaatatggacccttataagggagggaggagggtaatcatgaaggccacctggaacattgtgtcctagagaggtatcaaaatgttgacatttggcaagacatttctttgctctctcaaatgactttgatagtgtcttagttagggttttactgctgtgaacagacaccatgaccaaggcaagtcttataaaaaacaacatttaattggggctggcttacaggttcagaggttcagttcattatcatcaaggtgggagcatggcagtatccaggcagacttggcacagcaggagctgagagttctatgtcttcatctaaaggcgactagtggaagactgacttccaggcaactagggtgagaatcttaaacccacacccacagtgacacacctactccaaccaggtcacacctattccaactaggtcacacctccaaatggtgccacttcctggcccaagaatatacaaaccatcatagatagagtatgtttttctgttacatgtttatcttgcttctcagatactgacttttggtggtttagtgtgcatatttcttcttcttttttttttttttttacatcattaagaagtctcaataacgataaatcttagacatctctgagttacaaaaaggtgctgagggagaaaccagttttgtaaaccactaaatccagatgaatttcttccttaagcaaatacacaaaacttgacttgcagtaatcacacatgtctttaatctcagcactctagaggcagaaataggtggatctctatgagttcaaggtcagtatggtttacagagtgagttccaggacagctagggttacacagaaaatactgtctcaaaataacaaaaaatttaagctgagaaatatctcattcttttgaatttattttacaattttctcttgatatatgattgattttttttaaatataattctccttttcttctcagcctgtcttcctctcatatttttcaggcttcctctaatacacacacacacatacatacatacatacatacatacatacatacatttccaaaggctaatactttaatacttggtcaccagttggtgaagctctttggggaggattaagaggtgtggccgtgtgtgtgtgtgtgtgtgtgtgtgtgtgtgtgttagaatttctgatttttgtcattgtgaaggttatcctgcctgttgccttaatagttaaagcagcatgtttgagcaaatagggctaatctgcttatttcttccatcataaattatatattaaattcctaataaatatctacagtgtaaagagaacagatggtgatgattcatatttccaagcaatgatatagtgataattatatcagctaactggtataagctactcaatgtttatactcactttttaatttttttaaactttttaaaaattttattctttaatccttttttacagtccagtctttctctccctctcagtcttcccactgaccactccctgtcccctaccttccccttgtctccaagagaatgtcaccatcttccaccccaaacccaacccccagtccaccagacctccctggggcctcaagtctctagatactgctggtcttcccatggggccaccctactcctcaggttcctctagcttttccccaattcaaccacaggtttctccagcttccatatattggttgggtcctagtatctgcatccaactctttcaggtgcttgttgggcctttctgagggcagtcgtgctaggttcctgtctgcaagcacaccacagcatcagtaacagtgttatagctaacacattgctgaattgccatgggctacttttaggaaagactacactgtaatagatttcttgtctgttagaactaagcaatggcatcagtttagagatgttagtgtttatgtgggtatatcaactaagatatgaattactgcatttatgtaagttgtcttatttaactttcatctttttgtatgcatacagttggtataagaatcatgtctacattagagacccaaccaagtgaataaatctgtctgccctcttctcttttagctggaccacaccaattttgaggaaagggtacagacaccacttggagttgtcagacatataccaagccccttctgctgattcagctgaccacttgtctgaaaaactagaaaggtatgatcttatcattgactttactggcaaaagaaagatgtttttcatgtcttttaaagaacagaaagctggaatattagaggttccatttaaaagtgatgcatttaaataaaatcgtactcttgatgaatcttgatctactcaagaattaaacaatgaaacaatgaattaaagataataactttcttaagaaatggcctcttctacaaaaatagataatgcatagtctgagaatttctatctagtgttggaattgatgctttttttactctttgtcaagcattcttaacaatgaggtgcattcttagccttggccttttgatacaaaatatcattagtccaggataactctaaactcactatataaccaggatggcctcaaaacctcttcctttttgcattaacctcctaagaactaaaggcatataccaccaagtctggcttttttgaaaatatttttaagttgaagatttttataatgatggtggtctgagtgagaatggcccccataagcttatatattgaatacttggtactgagttggagaggctgtttgggaaggaatgggaagtcttgcctttaaggtttcaaaagcccatgctgttcccaattagctctctctctctctctctctctctctctctctctctctctctctctctctctctctctctctctctctcttatggttacatcttaagatatgagctctcagctgccccaggatcatgcctgcctactgctaaactccccaccatgatggtcatgaactctccctctgaaagtataagctcccaataaactaattcttctgtaagttgtctgagtcacagtgtcctggcacaatagtataaaagtaactaaaacaattatattagtcaaaatacataagccagttgaatattcttaaaatagtagtttcttttatgattattataagtaggagtagtttagctttgtgatattaaaacaaaatatatttggaatttttgagatgagaacttatgtattttttctttctaattttggtttattatattgataatttcatgcaagcatatatgtttttgtcaagtccatctttgattccagtctactcaatgcctatctgatcctccccgccccctcaccctcccagcttccatgtgctttttaaaaatcacagttagagctaccatatgcggataatataggaccatctactgggttgtgggttgcctctccagctgcatttctgaaaaccagctctccattaattactagtagctcctcaggtagtagtgggacttcataagcccctcccatccatgctgagattctcttgacatgattgtatacaggtcttgtacatgcagttgcagctgttatgagttcatatgtgctgtcatgttcagcacatactgtatttctgcatgtatccaataactttagctcttaaactcatcctacatccacttctatgatgatccctgaacatataggtatcttatttatagctgaggactccacagtcatgtcttcatatactgatcagttgtagacctcaaaattaattgctatctactgcaaaaagtagcttatctgatgaaggttgaggtatgcacaaatctgtaaatatagataacttaggcagcaggttaatactatgtctatttatcaggataatagtaataggttctcccctgggtaccaagcataactcctatcttgtgaagtgggccttcaatccaatcagaaaaaggttaattacgtgagttgacatcattcatgtctctgtgtcctactcatgggcatgtctttctgaagccagtcttcattatagatggcagtgtttatatgtaagcctgttactttttcctccagtcacatgcatagaattttcagcactatgaccaccggccactatgggtgaagcttactttttgctacctgattgatttttttttttttttttttttttacattttttggctcaagtatccaattacttgagcagtagggtgttcccatcaaactctggaagcttaccaaaaacattggcaatatgtaaagcctgtaatatttgggggattatgggatcccagtaaccaaaaactctagagagataatcactgcctggcactgggaatttttttattaatttactttatatcctgatcatagcttccccttcctcctcttctccctcctccctctcaacttaccccctctgttttctacaggatcctgtctgattagatttcccaataagattttttacttggattattgatgttttttcatttccagaatcattttagtttgaaattgtccaacaattctcttaattgaaggttattatcctatcttctaatgacttctttacttcattgatccctttattctttttaatacattcatgcctttttccagatgtttgaatatactcatactttattaggtgctattattgtaggattagtaatctgttgaggaaacatggtatcttgatttttcatgtttatttcctttctatgctgagacttgtacatctcaaatagttgttgagttccctccttctccttttcattcacatcactgcctttcactgaagtcatctacaatggccatgagagtactaggtctcagtagggttgagaatgccatttccatctgtggtgcttttagagggaatgtgggtctgagtagatggcctaagaaagggtagccagctttcctgctacctgtacaaagatacatagttgaggcatctggagcaaaatttatgtgagctgaatgtgtgaatgccattatacttcatggaaaccattatactttatgaatttgaatctttcacatttcaaccataatttctcatctcggccactctagaagaaaaaccgtaattatcttcagcttacagataaacacatcatggcttagagataatgtaatttgccaaccactgaatgatgaataattcagtcctggtgaatttatcatagttcccttttctgactattggttggggccattgtgattgtgagtgacagaagcctaatcaactaggttcatcaattaagaagaggacatttaatagctcacaaagcctaaagtatgtgagtgtctagatagatgactagcctgagggctcagtgggtccaatatatctgcactcaaatttctacttgtgatattttccctctgttggcttattttcttagattagttttctcctcaggttgacctctcagaactctatgcttatacctgtctgctccacagaagataataagcctcccttcccttcctttccccttccccttcccccttctctccttccctccttccctccttccctccatccttccttccttccttccttcctctctgctttttatttcatcaccaaatttatagaattatttagacttagttttatgtcccctattctgatagagtttttaaaatttatctattgtgttttaattcaaacgctgtctcagactggatacataagttctagtaagaaataaattctaacctatattgtctttgatacaattttgtatctctttatcttatttcttatatatttatgaaaaccactcctttacccacttggggagtgactgaagttctcagtctgtggctgagatccattgattgactcatctgcttcaattttgtgaccatgagattgaatctgcagtgtgaaaaccatgagcccactctgtgttcctaactaacttatgagctttgccagtctggaactcttttccctcattaagtttctttactgtgttgctggattaataccatctacttttattgataattgctctagagctacagatttttcaagtcctatgattaaaaataacagcttcttttcccctcaagtctatatgtcttccatttcatagctgacaattctttgctgttctcgtttccacttgtttatcattcatttatatatcaatgcctgaaatatggtttctcatcagactatgttcctcaaactgcatagatgagggataacagtgacctgttactgtcaaatgtgacactttttttttgtatttactatcctactgttattggtatcttcatcttgaaaccatttctttgatttatggacattctctcctctgcatttcctagatcattaaattataagtgaagtattgatgaaaatttttaacgagacctattgtgtggagattatactgctactatgtattttagtgccttattttttttattaaatttatttacttattccctttacaactcaatatcagcccttcctctcctcccagtaccccctgacacaagttctcctccattactcttctgaatgggaagcccccctttgggtgtccacccctccactctagcatatcaagtcactgtgggactaggtgactaggtatatcctctcccacttagactctctaaatattacagatggagaaactggctctctgtttgtgaataaagagtagaagagaaccataggttgactaggctttatagatcagctgccgttagcatgtttcttagggaagtcatggtccatgtagtgcgacttccaagcttttcattaatatcagttgtatgctcttcctatcaagtgagataggaccatatttagttatgctaacttaatgataatgagaatagccattaaagaaatccaaggcctttatctgatcattcagttctggtctgtggtttatggaattttttttcatctcaggataatttgaaaattgagatgaaagtgagactgagacatattttattccattacaaaaattgtaaatagttttttttttaaataaaaagcagtggtagtactgaaataaaactttttcaatactatttagtacctatccttactataaaacatatttttattttgctctattttcaaagagttagatactattaaatgaattcagtagttggatatgaagtttaatgatggttctctcattgtttttctttaaaactccaaatgggtttttcttgtgttaaatcacaaaatgttcccctttcattagaatgtctgttggtattgtcattgttcaggtctcttttaggcaaccaggttgtattatggctgtcacttcactgtcatttctaagagacatatcttaagtagactttctggccttctggctcttacagtgcttcagccccttctttcaagagccccacttctaaacaaagaactatagacaactgagagagaaatgtttttttctagaggtgagctccctaattagttatcaaatgccaaggagtcatccctgaatcatatttatacaagcagcactaaaaggactcaccaggttgtttgtatgtatgtatttatgtatgtaaatattttaaaataataatagatattataatcaaagacatgaggctatgaatttgagaaggaatgtggaagagggacaggggaggggctgaagggaagagacataggaggggctagaacgtgaacaatgaaagagaaaatgatgcaaattatagtagttaaaattaaaatatatatatttaaaacaaaaaattcacctgatattttgttgtttgaaagttgcatattgtgaagtatgtgacagttaaaaacacataaatatcatgaggtaacaggaaaaaagcttaaaatatgtatttttgcatcttgttctgagcacaaatgcattctcagtgttatccatcatttgctcacccttgtcattgcttttaagaaacctagtatggttctttaacatacaaaacttagtatttttataaatgaaactggacagagtgatttcatggaagaccatcagattatgacagatatctattgggcagttggtactggagcaacttcacaaggttttatcacttacatcacagttaatctctttgacactcatgggacagaaagtatgaagggagatagagcagctcatatatttgcacctgcagttcactggtttcattttcttattccttgcagagaatgggacagagaacaagcttcaaaaaagaatccccagcttatccacgcccttcggcgatgctttttctggagattcctcttctatggaattttgctatacctaggggtaagaatctcacgtgtaaatatggtgtcatatattattaagatataatcatagttttgtgattacagaagggtgaggacaatcttgtaaccaaagccttttgttttctgtttagtatttgttttcatttttttatatagaattttattacaagtccaaacacaaatgactgaaaattctatcaaagataagtgaaaattcttaaaatgtagatctcaattgatagttcaaaattagaatgggtccaaaaatcaaattacttgtttcaaaattatgctcatttatgaatccagattataatgacttaatagtatatgaggttactggcacctttacttttctgtgctaaaaaagagaatgttagaaggcaatctcataccaagaatgagactccattcagtcagtgataccaaggaatgtttatgatattttctgctcagatagatagatagatagatagatagatagatagatagatagatagatagatagatagaggtaatgtaatgtttatattttgaaaacatatatatgtatatatgtataaatagatatatagatagaattatatagagtaatgtagattaatgtttatgatattttgaaaacacacacacatatatggagagagagagagagagggagagagagagagactgaattgtttacaaaagataataaaaatttaaaatgaggtggtgaggtgcacatagaatgtattttgtcagcaccctatgtcttcatcattgtaaagagaatagcagcctgggaacctgggctttgtgctgtttaagaactttggatatatcccagatgtgttcagaagtggttattgttttctgggtcatgcgagcatcactttgaagcttgatcatagcctgtaaaaagggtgacaagtggaaagtgtgttgagtctgatgtatcaactcagcacaatactgccttggggtgttatgtttcatctgggttgacttgcattgtatttcttcaggtctttatcctcagatagcatgggctttggtttctcctcaaatgatgtatgaacaatatgtagccgtgctacttaaataattttattttatcctgtcccagaaaaagtcattaaaaatttatcttgataaaattgactataattactctagaatcttttctagtgctattattttctagaagaaattcttctggtctttcttaatccatatatatgtatgaacataaatgtatagatgcatagatttgaatttctttttaagcaaattcatgcatattatattatcacatatttccatgtagattcatatattatattcacatataataaataatgtgttatatattatagatctgttatttaatggtagttctatatatgaaagaaaagactataaaaaagataatataatttcttctagtagaatatgtgttataaaatgcatatatagacacataaagatatagacagaagaatgagatatcgtttaaagatatctttgtggtcatttttatcagtgagcacacccaagcatttgaagatattttcagtcaagatctccttgtgagtagacattaagaagagggagatgcagtaaatatgaaaaaatatttaaaattttgaagattaaaaatagcaaaaaaaaatcacaaagcattcacaatgtattaattatctatggatagtgattagaagtacttctgagacaaacggagtgctggaatgtatctctggacccatcacagcctttggagccgaagatcaaatttctgcaaatacccaataaaatgggtaaggaaaggtcctgatgggagagagtagatgaatgtgcagagtgagaaggcacgagaaacaaagtgagcaggacacagtgtaatgatgttgaagggtctcttttatccctccccatcccccatacacagtttcactgagatcacaaagttcagtgttgtaaaactgttgaaatctagatcccacttatttaggtaagtataatttccaagatctattatttatttcaatttaagttttatcttaaaatatttatttgacaaatataaattgtcattgtagaatatacagtgtatatttcaatatatgtatacaatttttcatgatcaaataagggtaattaacatacagatcactcagtcatttaccatttctttatggtgagaagagtaaaatactctcctggttgttttgagatactgttgctaactataatcactctagcagaacgtattccctcaatacttgaatttgttgctgataacagagctttcccagcatcctcgtccctcctacccttactagtctttgttatcttaactcctcttccaactcacagtggaaatgggacaaagttgagccattttaataagcttctactgtgtcaagtaaccgctgccgttgctttactgttgtgtgttctttctgagcattttcttcttcctgttaaataaacaaacattactgagacagatataacaattgtacagataaagataacgggacatacattcaaaatgtgtttatattcttggtcgctgtaggccatgataattgtggcataacaattatttagttgttttcagtattgatagaaaaaaacactattaaaaatgccttcaactatgaaaggttaagacaaaggaaataccattacaaaggaccttatttctacaacagtgatgcaattttaaaatcatattagctatagtacatccccattaactgtggacttgttttttctttatctgattcagcagccagacatagcatgctctttaatatttcagacttccagcagagaagagcaacaggctgctgaaaacctaagtaggagaatcaactaaggataatcatttttttattttattttatttttaaactagatgttttctttatttacattgctaattttgtccccttttctcatttcccctcaaaaccccccctgtcccattcccctccccttgctcactaacccacccactcccacttccctgacctggcattcccctacactggggcatcaagccttcacaagaccaagggcctctcctcccattgatgtcccacaaggtcatcatctgctatgtatgcagctggagccatgggtccctccatgtgttttctttggttggtggtttagtccctgggagctctgggggtactggttagttcatattgttgttcctcctatagggctacaaaccccttccgctccttgggtcttttctctggctcctctactggggatgctgtgcttagtctaatggttggctgagagcatccacctctatatttgtcaggtactggcagagcctctcaggagacagctaaatcagactcctatcagcaagcacttgttggcatccataatagtgtctgggtttgataactgtatatgggatggatccccaggtgggacagtcactggatgacatttccttcagtttctggctcaaactttgcctctgtatttcctacaatgggtattttgttccccctaagaaggactgaagtatcctcactgtggtcttccttcttcttgagcttcatgtggtctgtgaattgtatcttgggtattgtgaacttctgggctaatatccacttatcaatgaatgtgtgttcttttgtgattgagttacctcactcaggatgagttccatccatttgcctaagaacttcatgaattcatcatttttaatagctatgtagtactccattgtgtaaatgtgccacattttctgtattcattcctctgttgaaggatatctgggttctttccagcttctggctatcataaataaggctgctatgaacacagtgatataagtgtccttattacgtgttggagcatcttctaggtatatgcccaggagaggtattgctggatcctctggtagtcctatgtccaattttctgagcaactgccaaattgatttccagagtaccagcgtgcaatcccactagcaatggatgagtgttcctctttctccacatccttgccagcatctgctgtcacctgagttttttatcttagccattctgattggtgtgagatagactctcagggttgttttgatttgcatttctctgatgactaaggatattgaatatttctctaggtgcttctcagccactcgatattccttagttgagaattctttgtttagctctgcaccccatttaaaaatagcgttatttgattctctatagtcacttcttgagttttttgtatatattggatattagcccactattggatgtagggttggtaaagatcttttcccaatctgttggttgccattttgtcctattgacagtgtcctttgccttacagaagctttgaaattttatgaggtcccatttgtcaattcttgatcttagagcataaactatttgtgttttgttcagaaaaaaatttcctctgtgcttatgtgttggagacgctggtattggtacggtgacaggcaggtagataaatggaatagaattgaagacacagatatgaacccacacatctatggtcacctgatctttgacaaaggagctaaaaccatccagtggaaaaaaagacagcattttcaccaaatggtgctggttcaactggcagttatcatgtagaagaatgccaatcgatccattcttatctccttgtacaaagctcaagtccaaatggaccaaggatcaccacataaaagcagataaactgaaactaatagaaaagaaagtgaggaagagccttgagcacatgggcacaggagaaaattcagggtaatctaagggaagctaaataaagggaatctgtaagcatgttcctgacagactgtgatcaccagagagagcttgttactgtagaagtcacaggtgtatactcacacgtatcttcgattccatgtttccatcactacatgtaagtatcattagttcagcttaaatcgagacctttttttttaagtcccagaaagctaacggacatgaagaaagcctggttctcacaatgccacagttcttatattccccagactgttataaaagaggatctgtctctcatatttagacaaagacaggcttttgaatccaagcctcctgctcctgaagcaagagtatttgcggtaattctgcttatgagtaggctctgcctagggtactttttcttcatacatcccctcagtacgaatgctctcagcaaagcttctagaggcctgctatctaggattcacttctcatctctgtcccatccctgcgaacacccacagctggttgcttctctggattcagcttcactcacacctgaactcttcctaagccatttctctagcccctctatatgtgttattatgtcatgttttacacttacatatctatgccacttagaatttacttctccactgaattaagttccatgcattataagttaaattgttatatatatttgggtcttttactggaatttctagataaatcagtatactttctttgacctgtgacgtgtatacatgtatggtttaatatccagtagcttaaatgttcatattatttttattcttcaaatagtttcaattagaatttattcctaaattaaattcagaataattttatttgttgttttaacaaatatttattggttaagcatgctcactaagaatgtattatatatgtcataacacttgtgacaatataaacatatagccaataacctggtgcaaatttattcatttttaaaatatacttaaaatttttatgtgattacactaatcttacaaaatggattaggtgaaacatcatctttgtaatatgtagatttttttagttcagttagtttttttaaaatgtgcttagtagtttctggaatcaatcacatatcatactaatacaggtgctttttactttttatataattcatagctatcatttttctcattaaattatcttagctagacatttcagaataatgttaggtggtcatagtagtcagggttcttttgctttcctgcctcccacacttgtgtttatcaactattcctgattctggaagaaagtctttcttaggttaacaagcaatgttgcgattcagctttgtagaaattttaaccagatactgatactttttatcaaattagttatttcattgttactgtgatattcacagcttgttcagtagtatattagtattctgttagttgatttcttggtatcactagcattaatattctaaatgtaacaatatacaaaatgtgcttgcaacaagtgaaggtgatactattacttagtagctgcacaagatatagcaagaaactcttaaacctcacatgctagcaaagcaagcactcctgaactaaatccgcaggcctgtaaaatgcagtatttttttttttaagtataaagataaagtccatataatttagctgcaagcctgagtctgcacttgtttttgtatgaacttttctctatggtctgcatatgcactcaacacagacttacctgtctgtctctagaaacatctgattatttgtcaggtacaatggaaatggcttaagggtatgcatctacagtgacttagagctttgttctggaagtgcattcaggtgtcccctggtcggctgcagtgagaactgaattattcctaccatgagtgcaagtcttttagctagtttttacatggtcacttacccagatgacacatggtcttatagtgggaaggaagtatatatagactggcctggaattcataataatccttttgcagccttcctagatagggttatactcatgtggcaggcctctgcatagtactcctagactcaggtcatgcttccaggggtgatgttataggagcgaaccttgtaggtaaccagagtttgccaataaggagaactgtccaaacaacagaagtgcctgaggtgacacagaataaatatacaggaataagaatagtaaggaagaaggcatgaactcgtgagggagtcagatgggacatggatggagttggaagtgagaaagtggtaaagtgattgtttctgtgtgtgtgaagtattcatgtatgaaattctcaaaaaataaatggaaaaatgggtatttgagttttatgattctgaatttagtgttcttattgtcataaacattagtattaagcttattttctaaggaaaacaattaagaaacttgcgttttgatttatgcctgataaaattgttaaaatacgtcattgaatattatcttatttaaaatagttttgcattttttctattggatacaattctatttggagtagtatttcaatgtggtgaaaattagggaattttttttcggaaaatagtctgagcagcagaggacatgcaactcgcatgcaccaatgctgatttttaaaaaggggctgtgctttatagattaactgaggtatcagttacagtttttcttcacacttaaaaaatgtcatgtggatctatgaatggttccattgtaaatattagagaacatgatacataaaagagattaggggaaatgatagaaggagagagtctagaagtgctggttttgtccttgagaactgtgaggtagtaaggtttatgctgtgctctacaaaccatcttgttattgaaattttccagtaaagaaacaagctgtatcttactgtgtgaatatatgctcctccagagtaatactgtcagtgtccttatgagatgacgtgtattgttgaaaagatgagtatgtcttgctagttgaggcaagatgagatctaactcattagtagcaatatgtaaaataggcatgccatttaaagtattgaaagctataattactgtattaaattgtaatcaaataattaagcaaataagtctagtatgataaagtaggttattgaaaactgtaatggagttctaacattagtaaacagaagaaaaacatttaagcttataacttacaacttgaaaaaaaatctgtgtatttataagagccagaagctggaaagaacccagatgtccctcaatagaggaatggatacagaaaatgtggtacatttacacaatggagtactactcagctattaaaaacaatgagttcatgaaattcttaggcaaatggatggaactagaaaacacacacacatggagggacccatggctccagccacatatgtagcagaggatgaccttgttggcatcagtgggagaagaggaccttggtcttgtgaaggcttgatgccccagtgtcgggaaatgtgaaggtgggaaagagggagtgggtgggtgggtgggtggataggggcacaccctcatagaagcaggagaatgggtgatgggatagggaatctccagagagggagttcgttaaaggggatagaatttgaaatgtaaataaataaaatacccaataaaataaattatagataggccatatcaccctgaatgtgcctgcttagtctctaatataattcaacatctaaatatgttaaagatgtttagctatgtaataaaaatatgatgcatatgtaagatgatgtacaataagaaatattttatatactttttaaaataagttttatttattagatgtctcaaacaattggcatattatatctgggtaagaggttagaaattctttttgatacctccctttttatttggcataattcaaatccatttcaaccctgcatgtaaaaggaaagaattatatctcattttgtgattatcttggaaacttttccaaaggcttgaatcttcttttctatgcagagctttgaattatactaatatgaagtgctgtatataaagtagagaatgagcatctacaataaaggcaatgattaatgacagttaggttgtagttaattccctgtgaagatgaaggtgagatacaaaacatggtcatattctgggactggtgggacaggtagtgttggcacttgggatttggaaaagccatcatagagaacaatgaaaagcaaattaacagtaaaaatttgatgtcacatctatattaatcttctttcaagatttagccctaagttctattttactaagttatcataaaataaaaattgggagatgatgtctttttgtaattcaaaggccatttgtggttcaaatccatccatgtacatttagaagggttgatgaatcagttgaacggcttggttggtaatcagttttggattattgaagtttatgggtttattggaaactggctcaagatagagtgctctagtgcacaccttactgatgcacatacccagctctacactggcaaagggaaggaacaggacccaagcggctggctttaaataataccagtggtgctggcatgctcttccctcctgaatccagctccgctcaatggttgtactcttgagaagctgttccttctgatcataataccatggctcaaaatccttaaagaagttcattttgaaatttcttagtgtcttgcttttcttggcctccatttcttcacctgcctgcatagtgaaaacagttcgtacatgactgagagttgtgaaatcctctgggacatattttaggaatggtttgtgacatgtacatgttactagttaatgtaccacttcatcaagtacccctttacaatatagttgctattcatgcaggttttagtgaacacctcacacaaacttgtctctaaatgacttttgctgtaaactaataaccaagtcttatttcagagtatgcacaaagacactatcagcagtttcataaattgtccaaccttctctgtaaaattattttaaattattgtaaagatgaaattttcataattaaaatgtgaacaagaaatgaaatttaatcactgccttctcctgcaggaagtcaccaaggctgtccagcctgtcttgctaggaagaatcatagcatcctatgatccagaaaacaaggtggaacgttccattgccatttaccttggcataggcttatgccttctcttcattgtcaggacactgcttcttcacccagctatttttggccttcatcgcattggaatgcagatgagaacagctatgtttagcttgatttataagaaggtaatactttttggaagatgttatttggtcttgttttactatttcagtgctggatattaaattcagggtttcttgtatgccaggcaagttctttgctgagtttgctgccctgcacagtctcaggtattctacctgacatgtcttcagtgccctaaatgtgagcttgtacaagaataggtgtgaatacttattcctgttttaggtgcctatgaaatatatggcaggtgcaagtattgttctgagttatctatccttgataatgcaaagtgattcagtcgacagttattaaatatcttctgtaaattacctatatttcagatgtcatattttaggggaagtatttgaatagtttagtggttttttttaattgtcacacaaaatagacaagtgagcagtaagctaaatcaatgtcagattttttaatccactttttttcagttaaaatgacaaatagtacaagactcattgacaaaatatcatcctatgataaaattctatttttactagcaataatatatcactgttaatgataacctaagaaatacattcccaccttagccagctgccacagatggtgacagtgtcacagtggtgacactcatccatctccactgtcttactttgagtttgatttttttgtcatccagtgaattctgaaactttataacatttttgaaatagcatgtacgttgagatcatgtgaacttaactttgcttttctgcattcattagctagataagaaggctttgtaggatctaaatagattgaaatgaacagtaaacctccctgcactccagccacagccacctgccaaaccaagcaggcctctgaccaagacaaagactctcctctctgtgggacctagcctggagccccgtcctcctgcccttttcccttctgcccagggtagagtctgcccgccggttcccactctgttctcagttcttctgtgacaggcatctgaggtgttcaagactgagaacttgacgttcctagcctccatgtggcccagggaccccagaactggctcttctacaacccccagtggaaggcctgcccagtggtgccatgtgggtgtgtgcagttaaacgccctgcatctgccttgcctagtggcccgagccctgataggatgtgggatcccacttttttttttattagatattttctttatttacatttcaaatgttatcccctttcctaatttcccccctgaaaatcccctatcctatcctctcctccctcccctgctccccatcccacccattccggcttcctggccaggcattcccctattctgaagcatagaaccttcacaggaccaagggcctctcctctcattgatgactgactaggccatccacagctacatatgcagctagagccatgagtctctccatgtgttttctttgattggtggtttagtcccagggagctctggggttactggttagttcatattgttgttcctcctagggagctgcagacccctttagctcctagggtcctttctctagctccttcattggggaccctgtgttccatctaatagctaactgagcatccccttctgtattagtcaggtactggcagagcctctcaggagacagctatatcagtttcctgtcagcaagctcttgttggcatctgcaatagtgtctggggatcccactttttaactcacatctaaatgttgtcttaaattttgacaaaactcaagttatttcagtggcaccaatgtgacttcattgctctaccaagtgatcaaagaaagatatattggtggtatttagatattacctttatctttgctattttctttctttagtaacacattatatatatatttggcttataagggctatgggtctgaaattgacctctaacaagtaatccattataccactacagtacatactcaaggtcagttgtgttataaaatcttgatagccatactttattgcttaaaaaacacttttatgccaggcgtggtggcacacgcctttaatcctagcacttgggaggcagagacaggcagatttctgagttcaaggccagcctggtctacaaagtgagttccaggacagccaggactacacagagaaaccgtgtctcaaaaaaaaaaaaaaaaaaaaaaaaaaaaacaacaacaacaacaaaaaatcagttttatgaaggcagagaagaacaaaaagaagtcagagtttaattcaatctcttatgctacaaaatcatcaattcataagttccaagaaaacatgaataaacaaaaattttagagattatttggaatgtagaatctataaacttgctatcaaagaaaattgaatttactttaataaatatttgttaaaagtacttctaataaagataataactaagcatatgtatattgcaccaatgaattatttaaatgtgatctaattttatctacccacaagtttctactatagttgctattatccttcttttaaggaacccaaatcctataaagaaagaacattgaaaaaaaaggtatttcaaaactttaaaatagataagtaacagccttagaaaatggtttccaagtaattaggtaaaacagaagtatggaaacataatattgaggcaaaggacatgtgaagtaaaatgaaggggatggttaattggtaatcaagtccttagagatattggtgaagaatttgaagctgctgcatatttatttccctcacaacatcacctactgtgattgctgatcaattagtttatcttatagaccacatttaacttcccgatactggcttatcaccaaagagtatgaggacatcttcatggttctctagctggtccctacttgcactttgtcttggcttgtcccgtagcttatatccattcccctatccgtactgtttcaggttcaaggcaaggacacataggatccttccaacaacatctgcaatttatagtagagaaatccactcccattaaattctgaaaccaaacatgttatactcaaaataatgaatactaacacaagctgaactttgcccatcattttgaagattaccaagataactgaatattaactatgtgctatggatgaagctccatgctttagcctgtgcattgctttatctgacactgaaattccttctaaacatatgtaatctaccacagtgggttctccctctcttcttatttctctaataatattttgtaattacctatactcattccttcttcatctttgcttctctaaatatatctattttataattttatctctataaaatctttcatatttttaatccaaattttgagcccactctacattctgccttccttaactaatttatcatattatctatatgataaacacacactcacacacatatgtgtgagtgtgtgtttgtgtatatatatatgaattttttctaggttactcccaggaaagaattgtatcttaataaatgctaattcctgatacatacagaacaatggtttacatctattaaatactcaacaaatatgtgatgagttgaaacatataaaatgggtgctttgctgcaaagccatctaacagaaaataagttactaaatttcaccaggcaaaggattactctatttcatgatcataatttatctaataagttaaaacattaatttatagataaataaatgtttttaatcagtgatcttccatgtttttcctttgtaatatttgaagactttgttttgttaacataaaaatactgattcagttattagtaacatacttttgttggatttaagtacttttatcccaaagaattagtgaaggactttatgaaaaaattaagacaaggattcactgccttaggttccatcttttatttctaaactttcaatttttttattgtttgacgtctttaaatggttacataattaattttagttatctgtatcctcagtttctctctcattccttgccttccctctctggaactcattgtagcagtactcgtctattttaatgcctttttgcgtgtggctcattaagtttaatgagagcatgggtgcaatgatatttagtggagcaagggacgcttacatgtgttgcagacatgagaacagaataggacaactcctctctaacaaccatgagcctgcctcacccatcctaaaatgttttaccatgtacagataaccccagctctaatgggttcatgactgtaagtggtatgtcctgtagcaaaggtgtgtgtctactctttctataggtcagctcttaaattcttcatgctcccacttctgccatgttctctgaatcatggtggaatgatacaaccttcccatttatgtcaaatattctgttaccacttatttgccactggttaggtttctgcagtcaccgggaaccattgtagtaagaaacttttacaataacagctgggtgcaagctctaatctatggtataaacatgagtagtgagaaggtagcttgataacatgaccatttagcagaataacagttacttgcataccttggtggtcaaagacctccccagtcagagacttaaccagggttacagaaccaaatataagttcccatttgtggaacaggccatacatataatcagcaagcaggtagtcatcaccataagaattacactactgctctactagaggacacattttacaaaggtatgtgattactatagcttatagtcccagctgggtaaggctgatgatgctttccccagtgacttgcatatgctgcctctggcactacgaaccagtaagcaggaagcttacacttcatctccatgacctgtgaccatagcatacaatacttaacatcaagttctggtaggtatccaagagcactgggaaaagcctgtgttgtttggggcacctctgagatcccccttgtcagtcactcatagggaggtatcccctacccagcactgggacttttgtttgattattcatggtatctgagaggaatagcatctaaaagaagacctctatttaagctttttaaagattacatatatttcttagaactgtagaatagtttactaaaatggtaaatttgaactcaaatatgtatagtttttaaacaggttcaactattattaactaatttctcaaggcatgatatatgttattggcaagacaaacactaataataatgtttacaaatctctatattaaatcatcttgataattgcaatttgggacacacttcattactacataggatagcatatgttttcttgcattattggtgacagagacagatgatgagtaaatgagtctctgccagtgtatttctgtatgctgataagattgtattattgtggtgctggagagatggctcagcagttaataacactgactattcttccgaaggtcctgagttcaaatcccagcagccacatggtggcttacaaccatccgtaatgagaactgacaccctcttctggtgcatgtgaagatataataattaataaatcttaaaaaatagattgtattattgcaaatcctatccccaccatatagtcctatgtggaactccattctgagaaagctagttaagttaaaactaggtagtgccattttgaagccactcaacagagaatgcctcagccacccaaagtagagggaagatgactgtctaccctactccttattgaactctccactgtgaactactacttgctactcttcttgctgtctactgtctccccaccatgttccattcataagtctttaccttaagtagccctcaaccctggcctccattttcatgtctaatgtgtaatactatcctcctcctctctttctctactgtctctctctatttttcttacttttgtcaacatattattacacttgatattctaaaaatgaaaagctgagatcctcacatgaggaagatctggtagatttgtcctttggggcctggcttacctgactcagtgtaatatttatttctgttaaaaaaaataaaagaaaaacaaatccccaaaactcaaacaaaaccactcaaaacaacaacacaaaagattcaaccttatattttgcaagtggaaataaaatatcattcttattgtcaaagacaacaaagtttctatatgacagaaaatatctaaatgtaagcatttcaatatatttgtttttcagttgtatatttttaaagctgaaaaagtataacagtaacaaatatgaaacaaggttgacctctcaggttaagatacattcagtcacatcttactaatgtgttattgatgaatacattttatatttgtttgttgacatcacctaacttgccactttttcttttagactttaaagttgtcaagccgcgttcttgataaaataagtattggacaacttgttagtcttctttccaacaacctgaacaaatttgatgaagtatgtaccattgacttaatgttttatgcattttattagaaatcaaacaattctaaagaaagatttatcctgcatcagctaacagtgataagtagcaaagtcccaccaatagctagtttggctatttctggaaactgggaaagctagtcctgtagcagagcaccattctgaggtcaggtacgattgcccaactcaaacatacctcagcttgctcttaataatgtttttcaaaacttgatccttatcagacttagcttgcttccttttagtataatactttaaattgttatgtactttgactaaatatgatactctgagcagttcttgttctgtgctgtcttatgtcacaagtaaattcaaggaccttgaggacagataccatgttttatttatctttgcattttcaatatttaatagagcaagtgttacggctgaattgagtagcagagagagagagagagagagagagagagagaggaaaacctttttggagagtcccttgttctcatgtgttctgtgtgagaacactagctttattttaaaaaggtattaataaaacctaggcgcaatttcaaagatacacaatcttaattccactgaataaaaacataatgcataaattgtaatatgctaagaaccatgaatttattgattggataactcttcagtgttcattttcttccacatgtgtctctctgcttggttttgattgtggaatgtaatataccacttgattttctctgtgcttttatttttcagggacttgccttggcacattttatatggattgctcctttacaagtgactcttctgatggggcttctctgggacttgttacagttctcagccttctgtggccttggtttactgataatcctggttatttttcaagctatcctagggaagatgatggtgaagtacaggtagtggtctttttcaaagcttgaagaaatttgaattgggcttctctaagccctaacaataaaactatgccatgtcacttagaagggattattttaattctgtaaataattttttctataagaaaaaggcaattattttccctattggtctatagaatttctttattcatgttctaagtaaggttcagtacattttatattcataaagtttaggtaaaatggatattgtatttctttgaactggaaggaatgcctaaattttgtatggaacaaactggcctcttcctctccatatagtagggccattctaccaaagcatttattacttttattggtaatatgagttatatgatgtgcttattgcagagaatttgtagtttgcctgtttgaatgtgatagaaagttgaaaatctggggctatacagacaggtttctgttttagtttgtatatgctttcatttgcttcacaaaatggaggtgatctcctcttagagactttgtaaaggattggattagagatattgtccaaagttcatctaatggcgggtatctgacactttttaaaaattttttctcttcctgtttttctgtgacagagcgtctctctgtatccctggctgtcctggatctcactctgtagctgatctagaactcagaggtctacctgcctctgcctcctgagtgctggatttaaaagtgtgcactggctatgattttgtttgttcccagctgtttaataacaaaatgtttatctatgtaataaaaatatggaatttttcaaaattttgaatagttattagtagataatttgacttgtttttgttattgattgtttgatcaattgattggtttacagagatcagagagctgcaaagatcaatgaaagactcgtgatcacatcagaaattattgataatatctattctgttaaggcatattgttgggaatcagcgatggagaaaatgattgaaaacttgagagagtaagttgacataattacaatactggtccaattttatatttaacatttaaaactgaccactcaggtggattttcaactcaactcatctaaaactcaaatatatgtatgtcctgagttttacatggtttatatgtcagtgcctataatcattttggtgagcaaatgttttcttttgttttttgagactggttctcaatatacccttggctagcatagacctctgtatgtagatctagaccttaaaggcatgtgccaccacacctgtccctggcttatggttttacagttgattcagtttttttgtagtgcatagatagttatctcttactaatgattctgctatactagttcacagttgtttcatacccttaatttaattaaaacaatgatgaagatgctggggggctaattgaaaccataaatggaaatactgaaatatataattgtaagaggaaagggtgatcttgtatgacactgtacttcaagtattatgacacaaagagcgggtgacagccacatttggacaacttctgttattctgagcctgaggaataatgacaaaggaaattttccttagggctactcatataaattgcttacaagaggctaagtcagtccttgtaacaaaagccatctcctgagatggaatctttacttagcacctgtgtgtatcttatcttctttcacctcagataaccttttgcagatcagtaaagattacctctgaccaaaaaaaaaaaaaaaaaaaaaagcacagcaaggctgatacatcattactaagataattttgggtaaaataaccatgagcattgctgtggccatggaccgtttttatttagttgacttccgtgtcctaccaactacagtcaaggaaatgttttagacttctggggatgagcggaccacgaaagatactactaatttaaagacatgagatatatgagtatttcacagggaaaaggaaataaagagtgctctttgcaatggtgtgaatttgattatttcatattcagggtgctggagacctgtagacaatggtaactgagccacagctgtgtgattggaacaacaatggaaatgcttaaatgttaagtcctttgccatgtaaatagaaatagcaaaaagagtgtttattttccaaatactattgctcacctgtttttgttatgcctttcaaggtaaatctaggaaaggaattgcattttctttctagaaacatccttaaagatcttggggaattgttgagttgataagagttgtttctcacgttaacaggttgagtgctcccctgcactgcctgtaaacacagtcatggcagggctggttatcacagaatccagttttctcaggcttcataatcagcttgcagtaggccgttcctgtggctgacgggtttttgtttcctttttggggttggttttctttttttgacattggtattttacccctcttttcctcacataataaaatccatctttcctattctgaatttcaggctggttaattctaatagctagcatttgtctggttgtaacctgtttgatacatcatgaaattgttacctgaaaaagctggagagttctgacgtaaaaaggaaagcaggaattgctttaccccgcagagtaaatacaatgttctaggggagactgactggatgttcttaggattacctcagcctagaaagctgttgaactcggccaaaggctatgttaatgttcttgaaaaaaaaaatctgccttttattgctttttagccattaaggtactttcaattttttatacgaaactgatagaatttttttatgactcataaaatgttagggattttatgttagtgtatagatgattctgttgcgtgtttgggatcaattattctttttcctatgtgacttcttccttttctgagctgttctaaaatattggaacagttttgacactttactaccatttgtaaacattctttccttttataaataccaggcttatcaatgtatttttttatctctagaagaaagggatacacattgctcttttacatctgctatgctgtcatctaagcttaattacatctctacaagggaagtattacggtttttttagtgatagaatcacatttaattagatggaagagtgtcttcctttaaacataagtaagactagtccatcttcagtacaaatttattgaaacactacaactcactaggctgatcacaatataggctatacacatgacctctatccgtgagctcaatagtatattgttttctttgaggacttatttttttttttttttagttctaccacttgacaataacacttgcttctatggattagaggaacagtggaagcatagtgcctgtatatcatgtgccttcctgcaccaggctgtagatcagatactgttcctttccgacagagccttcattttgtgttcaccattggcctttgcccacacaagaactggttgtttttacaaatgatcacaattgggttgaggtttatggctcctggaacagtggcgaggttgactgcagtattgttctccatcttccttttgtcactaaagcatttaacctcttcctgtatatgttaaaaaagtaaatacctcccagttgaagtacagactagaacagactagaggactgcaactctagtgaggtgcgactgcagataattacatgacaatgagagggactaggagggaggagctactccctgctctttgaaggaccccctgcaactgagtgacttggcctctgactccagagtggctcctgggaagctcaggcagcagctcagcagatgtcagcagatgtgactgagagacaatgcccagtcacgtgtttctcactgctctttgatatacacacctcgccagtgctatttaaagccaagctagaatctcaaaactactaagaatatgatggataactacagaactgtcccttttgttcataaagcttgtaacattgttttcccttccacacatcacttcaagcgttaataaagaagttactaaagatataaaaataatataaaagtaaatctatttagataatacaatttaaataaattttaattataattataaatttaattatgatagcaattgaagttcttaattgttttatgttaacaagcattctgtgtaaataaatggtatattctttaagagtcatataagctaattaaggtcaagagaagttttgtaacttgcccaaactttggactgtatattcagattttgtattctaagacacctgattattgaaagaaaataacgtgtcacgtcttcttctgttttgcacagggtggagctgaaaatgacccggaaggcggcctatatgaggttcttcactagctctgccttcttcttttcagggttctttgtagtctttctatctgtgcttccctacacagtcatcaacggaatcgtcctacgaaaaatattcacaaccatttcattctgcattgtcctacgtatgtcagtcacacggcagttccccactgccgtacagatatggtatgattcttttggaatgataagaaaaatacaggtaacttccatgatggtatacttacatgattttggaaacattttagaatttttatagtggggaaaatctctaaaatgaatttcttgattttggatttattaatggattagatttccactcttcattttcatacataatttcatgagcgcttacagtgaaaatctaatgaaataaaatcctaggagattttgtaggtcaaatgaatttaaaataattatttctataatctagaaaatcccatccaagaaatctgtgaatagatcatttctaggcagcttgtaaatatccaaaaacattgaaaataaatttcagcaggaagttaaaaaaatgttctagctagccctggaatgctcaccttgtaggccactgtactttcccatgaagcattgctatgttccaagaacttcagcttccagcagaccagaaagttacctgatccctgggcaggtggggcttacagggttattttgagcattaggtaagaagtagtttattcagagcaagttgaataaacttctgagaaaaaaaatgtcttattatcccttaaaatgtatatttaaatattcagtgcagaaagtaaatcattgtgaagaataaatgtgggatcgagggtagactgctttttaagaggttctccaattgtttaccttggactgatgtcacaaatgacagaaaacatgtaattttggcttttaaatctgttttatttggtctttgaaacttttgaattaattaatagaaattagaagtagagagattatcatgtgtacctctgtccacaggcatccatgtgtattcacatacgtgtattgagtgtcttctggagatttgcgattatgtagtaatttgggttcccacagttacagcaactgccctcaaatgtgtatagcctgcccagctcatcaaatcttttacagccttttctattcagcgtttcacccccaaggttaaatcaacttgagttgtgtgactagagcagtcactcaaacttagaatcatagtggctctatgacaaatcttatttccctgctgacatcaccctagttgggtggagggatgagagaagaaagacagagagaaggggagagatgtaagaggagaaatgggagtatctatgaacagtaacacagaaacatctaaaaaaaaaaagagaaggaaatgagacaaaccaatagaggaagagaggggggtacaaggaagaaagatcagagcaaagattccaggtgcacagatttaagtcttatgctctccacctttcctaagaaccatgtggctggaattctctgatggaggcctttctcagagaactgagaaatagttctatgaagtccttctccttccctttatataaggagcaatgattatgatgttgctcgtaaagagagtgttaaaaaaaattgttgttcttttcacttgtactagccttgaactggtacatgaataattgtcagggtttcattagaaattcatattctatataacagtataagaaagaaacaattgcactgatatctaatgtataaaactaatttcatacactaatatatttaaagaatatattttgactatgatgagtcctactgcttggtactttaactttaagacaattgtaacgttaatttattaagaaacaatttctaatttaattgttaaaatccatacaagacactgtaatgttagagtggaagaagatataacaatacatttttgctattgtgattctacaattgaaagatttttgtcttcattgactaggatttcctgcagaaacaagagtataaagtactggagtataacttaatgaccacaggcataatcatggaaaatgtaacagcattttgggaggaggtgagatttctaaatatggtcgatttttaaaatatgtaaacaattgtgctttttccttttcttgcacctaaatttctactcaataacatataagattcaaaagatattatatctcatagggatgtaaggagggctatcctcttttataaggtgaaaagtgggtaaccaggaatattaaatgcagcataaagtgcctttatttctttaaagtcatataattgatttcatataatgggccaggaagatgattaccttcgatactagatctaaatcctgtctctgcaatacactttccatgtaatctaaatcatattatgttcaagttattaagcctcaagtgtcttcatgtgtaaaatagacattatttccctactgactaagatgatttacatggtctgttcattagtgcactttgcaaataatggtctttcagtgaagattaacttctctaatcatgactcctaagtcttccctgcctatcactcagaattgatgagccactgagttcccatgagcagcttccagcagtttactcactctgtatgtggtgtaggtgacctcatccagcctcaacatcagtgagctgatgacatgcaagtgcaaatctctaggcctaatttcaggcttgcatgctcctcatcaacttcacagtcatcactcctcaagctttactgccctcgtgctccagcatgttctccatctcctttcctggccacactgagaggcaagctaggataggatgcattacatgccaaactttcactagataaatatttctttttaccgtgttcaacttccattcttcctccttactcctaattgaatcctcaatgttgaacttagaactactgtttatgaaaggtgaagatagacccatacatttgaaatctagatgaaatacaacgttacttccttttttcccttactattttaacctttgcttttgtggttctctcttgtttcaagacatcatcattccttttaatactattgtttgggtctgagttttcatattctggagccttagtgatattggcataatattaaaaaagggagttgattctgtagaaagcaaggcaagaacaattgtgaggtgcaagtggatcataagaagtagcagacaatgaattctcaggcaggttacctttaggaaagaggatcgttggatggtgtggacctaaaaatagattcacttaaaactaggcacacaagtttcccaggcttcttcatgaccactatttgatgatatatattttgctttggagacagtacctccaagcttccattgggcaatagagaggcaagcaatttttaaaagaggatttctctccaccccatacatactcttgtacagaaaaattattttgaatccactagcaactttgtcacttgtatttgtagccaatgataaatgtttggagcaagtcttagaggattggaagtgaggattgccttgtaaatctaccttgtgagctacttgtttttgactttttgctgagccaaagtctacagttttaaaagaggaggattgaaaaattggtcttatatattatattgaagattaattaatgtttatttactaagtctgtaggaaaaagggtatatgtgtatacttccttatagtcttggtgtacacacacacactcatacacacacactcacacatacacacacacacacacacacatactttagccaataatatgagactgaggcaatgataagtaaaagtctgataaagagaaattttgttctcattacacataactatttctcaaacacattcaaccatactctccagaaaccatgtgctttatagttatatattataaattaattaatactatgtatgtattttaatggatcctgtaccatgtatttcttaaactgattgcatataaagttttctatggaaaatctgaaagcattattatcttcaatgtgtatgaatagggatttggggaattactggagaaagtacaacaaagcaatggtgacagaaaacattccagtgatgagaacaatgtcagtttcagtcatctctgccttgtgggaaatcctgtgctgaaaaacatcaatttgaatatagagaaaggagagatgttggctattactggatctactggatcaggaaaggtactgtctctttaaattgttaattttctgagaaatttgtacacaaatactgtaattatgtaatttctatccccctttccagtatcttactccttccatgtacccctcctcacttccattaaaattcaagacctttttgtttatgattattatatataatgttcttgatctattttgtgttttatatatacacgtgtttagaactgatcactcaagattggataacctatcagcgagctaatttttaaagaaaactgattctccctcataacaattttgcctgtaaattttcatctaggggatggagccttgtgagataacctcatatacattgtcatgtcaactggtaatgtcatcctgtaggacttgtttagttaacagtgttttgaatatttcataggtgtagcatctcattgtctaggagatactatctagcagtagacatgcctgttttctggctatgttttagccacatcttccacaattagccctgagccttaaatacagagtttgcattgtagatgtatcaacatggtcagttcttctttgactagctctagatctctgcaatgctttgcatccagtgcaaaaaaaaaagatgtgtctacaaaaagtggtgagaactatgcttacctgtggctatgaagagaagtatttagaacccagttagaaattatattagtttacaaaatggcagtagtaagagctatgacctctccagctatgggtagtagttaggtctacattacaagattactaggtatgaattgaatactcttaatgatttggtcttaggtctaatcaggcagctgttaggtatccctaggataccactgttgtaccattgatgttgtattttgccaagacatcaggtttttttttttgtttgcttgttttttaatctatttatttcatatcattaagaatttaatttactattcatttctcctttttgtgtactttgaagtatatgtaatatttcagagaaaatcacatatgtatggaatatctggtgtaatatatatatatatatatatgtaatatgtaggaatgtttgagtataatgtatataagttgcttcagtaatgatttccttcaggtttttcacataattttatacttttttgtatataatttagccttgtcatacatatagatggctttcaagaaaaccatccttttaaccgttctttacttcagatctattttcaaaactggtacaaaaaaaaccctgctttagatttcacctatttctctatatatttgacatctctctatatgtggatttttactgaatagacccaggcttgctttttatatattattaaaatatgtcaagtaagtgttaaaatgttaaaaattttaatttattcagtggctatgttactccccacccagtaccaagaacaatcaattatgatttggagagatatctgacaaaatctaattggctagaagtgaaaagcgctcagggattgtcacggtttcagatatgttctgtcatgtagataatgatagatacttggtttttggtagttacctagataaatacattaaggaccaaagaaatgaaatttacttgagccaatgctttgagcagcagagtacttgctgtggggatccataaaatagatccttgttgcaatcagattgttgttttagagtacctttcagtaatacaaatatatatttattaatctctaaaattctatttcaaaatataaagcaatgggagaggaagggtgggaagaaaaaagaggtgggagaaaaataaggacaaggcagtgttgttataaaataaaaatgaaaattaaggatcacaggagcctagcatagatgtctcctgagaagcttcatctagcagtggatggaaccagatgcaaagacccacagccaaacatcaggctgagctcaggaagccttgtggaagggttgggggtaggattgaacaagccagagggctcaaacacaccacaaaagacctacagagtcaactaagctgggccgatgggtgctcccagagatcaaagcaaacaaagagcaggcaggagttgttcctaggctcgctacacgtttatagaagatgtgcagcttggtcttcatgtgagtcccctagtaactggaccagggctctctgattctgttgcctgcagttggatcccctaccccctagcaggaatgctttgttggggcctcactgggagaggatgcaaaaatttaatcctactgagacttgatgtaccagaccaggctggtacccaaggtgggcttctctttctctgaggagaaggggaggtggtaatgggggtagggatttgtgagaattcgactgggagagggggctgaagccaggatgtaaagtgaattaataaaccaattaattaatgaaaacaaaaagcattctaaaaggtaatttgtttctattttatactagtatcttaaacagggattttattttaaagagttttatatgagattttggaaatagcacaaattttctaatcactgtacattttgcttatttttctctccaattgttttcttatctgtgacatagacatgttgttttgttttattttatttatttaaagactgaatgacctttattgctcatttttaattaattattttatttatctacatctatgctcccagaaatcttcaccctattcaccctcccctttgcctctgagagggtatctaaggctgggcatctctcttctctgggacatcaaatctctacaggattaggtgcatcttctcacactggggccagacagatggcataggcatcttaaataaagtagctataattttatattctcttcctacagaaatgcttgctcctcagagtgttatttctttcctcattttctgatatggaaatagagacagttttcacgattaaatgaaaatggtagcacaggaatctgcataactaatgctataaaagacacagatgaccagaaacacactgtctgctgaggagggggtattactagcattacacagaattttaaaaatgaattgttcatgtacttaagatcaatacatgaaagaggtataaaaatagctttggaagcacagttgttgaacttgtcagtagttaaccatcaggcaattctatgaaaccttaatgaataagtaattaaaatctgggactgttcttgcctctcacagaaaattgctgtgaaggcagagaaagatctgggttcccttctgacaacttactcagagagactgctgttttgtaagaataagaaggaaaaacgattatttgattgaaaaaatgtgaagctataatataagatttaaaatattaatatttaaagttaattttatacctctcaatttgatagtttattatttaagacttaaatataacctaataatcttatatgttatacccttatatatttacagagatttttgtataggtatctttggagtagtatggctatgttttgaagttctgtagtccttggttatagaaaattttacaagatatgtagttaagtgagaaaagcaaaacaaaatttttgtatagtaatgctacaatgtactcaaggatactaaactatattattattttccataaagtctatattttgttctactggatacatttataatatctatatatgcttcatatttcacttattcttaacagtttcttcattcataaggagcttggataaaaaaatcaatatttttccttctcctgctacctgtttttctttctaccaaatggtacattaggagccctttctgtgtaagcacggggacctaagcttgaattccaagctcacatgttaggtggatccataaccccacaatgagaggctcagacagttggatcaaaggagctcacaggcagccagtgaagctgagactgtgagcttcagtttattgagacacttggtttgcctcaagcaatggaaagagacatagaagatactagtatcctgctctggcctctacatgtacacagaagggtacaggtgtccacatgttcacattgtagctctctctctctctctctctctctctctctctctctctctctctctctctctctctctcccccactctgtgtgtatacacaaacttgacatccatcatttctttttttattgtagtttttttagaaaacatttattaggttttttattggatattttctttatttacatttcaactgttatcctctttccttgtttcccctgtgaaaactcccctatcccatctcccctctccctgctcactcacccacccactcctgcttctctgtcctggcattcccctacatggagcatcgatcctttacaggaccaagggcctctcctctcattgatgtcccacaaagccatcctctgctatatatgtggctagagccttgagtaccgccttgtatactcttggttggtggtttagaccctgggagatctgggggtactggttggttcattttgttgtttcccttcagtttcttgggtcctttctctagctcctccattgaggaccctgtgctcagtcccatatgtttttataatttcttaaagatgaaagcaaattttcatactagtaaaatgaaagtactttctaagactgaatctgtgttagtttattataatgaacacactcatgtagttagagcataggggcagcccatagcccaagagctttcagcaagtgctcactgtcaccagtctcttactacaaactgatcacagcaatttaagtaggggctcgctcttctttgtgaaccttagtcctatgttgcccagatctctttcatcccctttgtattttttatgcctagaaaagtccctgtatcatgaagtactaaaacatctttaatcaaatgagttacactctttaaacattgggagacttgtgattggaataattggacgcaagaaagggataagtaatttgatcaaacaatttagctgttgtttttatttgtagacatcactcctgatgttgattttgggagaactggaagcttcagagggaattattaagcacagtggaagagtttcattctgctctcaattttcttggattatgccgggtactatcaaagaaaatatcatctttggtgtttcctatgatgagtacagatataagagtgttgtcaaagcttgccaactacagcaggtaagcatatttatgaaaaatgctgattgtgttagctacttgtgtcagtgttgtgataaaattgcttgactactcaccttgaaaagggttttattttaaattcttttcagggatgataccgtccatcttggcaaaggaggggcaggaatgggaagatggcgagacatgttatatccatagtcaggaagcagacagccagcaggaagtggggcttcaaggcctaattctagtagcttactttctccagtaaagctccaagttgtaaacactgtcctaccccagtgtacccccaactggaaataatgttttcaaacacatgagcccattgtaggtatttcacgttcacaccactacatggattatgctcattcagtcttcagactaaccaaattacacagttagttctctattgagttaatgtaaacatgtcaaggaccccctaggattaagctggagtgggtgggtcagtgaataaaaccatgctcctactttaagtttacaaaattataaatagatgcagtttatttttaaagtgtgtttgggtgttgtaaaaataaaaattccttatgcatggggtgtggtacttcatgagtgcaatcctaatactcaagagactgaagcaaaaaggtcatgaagttgaagccagtcttagctgtctaatgagttctaggccagtctggatcacatggtaggatcatgctaaaaactaacaaaccaaaagtctgtatgaattcaataggagtattttgtgtacactttgagaccacagtgaaaagagaagctatcctagaaacttgtgctaaccttgaagaagatagccatactttcccaaaagtccttcttctacaacatgggggttgatgtgttctgggcttgttaccagatctgtttttagaagagtttttctgggcaagaattggagggagtaataagtcttacttggcttattttgggggtggtgggggtgagatagggtggtactttcttgctagatttagattttgctttgcttgagtatgtattttcccatataaatgatttcacagatgatattttgagtaatcaaagtcgatctacaaaatgtacataatccaaatatagcatttatacattactattaataaatttagagctgtggatcatccatgcaacaagtatttacaacattctggacacaggtagatcattggaatgcttagatgaagaaaattgtatttattgttaaagcttcatagtaggatggtatatattaataatagaggattatatggtttgtatagtatatatcaataaaatagtgagagaaggagaagcaaaatatattgttctttcatttggatgcaaggacatattacaattattttatagtgtatgatttattgtgttttagaatagttacagtggtacagtgatgaccacccttttagaacccctgaaaagaaactccatattcattaatagtcaaatcctatttttttaaaatattttttattattacatattttcannnnnnnnnnnnnnnnnnnntctcagctccaaactttgactctgtaactctatgcaaccactgatctatctccataaattctcctggtccttttctttttcacattttacataaaggaaatttattgagaatttcatacatatatctagtgtatgttttatctaatccatctctctctatctttcctttaacttctctcatactcccttcaaccacttcacccacccacatctgtgctctgccttaaccttcagagttcagtctgtgatcctagtatatggccttgtacccatgctatgctggcagctctaaggaaattttaatgtaaagcaattaatgtaaagcaattagttttcatcgacttagacttgctgtgctttatacagtgtcctgaagagtgatagaaacagaccaataatgaatttagttaaaaatgggggaaaaaagagaatattttaggagtaaaaagaagaaacagagagactccatcagggtctacccaaaaatagcagcctccacatgcagaaaagggtaataatattcctgatggtgtgattctttgtagaattctgaggttcacagggaaagcgagcggcccaagagttctttattaggaacattggaactatgaaaaaagagagccagactggacttaagaagtagggaaatggggtctggttgtttagagtaactgatagttgcccagtgaaacattcggtataagatccttccagtaaacactaagttatttttgcttcttttgaaatatagaataatatcactacagagaaaagcaggaaaatactttgagagccagttgttcttagaaagtgaattctgtagagacaaagttgttaaggacaagaagagcctccaaaccaaagaataatgaaaagacattgatatgatatcaatattgacaaaactggtcatagcgaagatgataacaatggcattttaaatttttggctacgtgacatagttaacaaaatttgggtatctatggaagaaatgaaaatgacagcagagcctggaggtttggaatgtggatgcactggctttctgcttagtgtcggtgagagctggaagtcactccactttagtgtatcttcagacccccaaaactatatgtgtcattcctttatgtccgactgttttggtttgatttccagtgctataattttgaccaaaaacatcttcagggagaaaagggataatgtggcttacacttcctggtcacagttgatcattggtgaactcagagtaaggaactaaaggtgggaacttgaagcagaaaccaaaaagaatgctatattctcatctgttctttgtcttgctagcaggcttacacttacctagctttctcttacaaagtagaatacctgccaggaagtggcaccacccaaaggttgtctgggccctcccacatcaattagccatcaagacaacttcccacagatatgaatagtccagttgcactggaaaaatttctatttccaggtgactctgtccaatttcaataaaaactgtctactttaggagagtcaaggtgaatagcaaatgaaagcttaaccatctctcatataaaggatttatatgataaatttgggggaaacaaacttaaggttctaatttctatatgctatgacagttgttgggttaaagtcagtggtgaaatttgagcctacttggataattcaggaagcccctctctaagagaagacttcttgaagagcaggtcaaaaagaaaggtaacattatgtataaaagaaaatgaataggtgtgaaaccacctattgcagggattataagcatcttgatagagccacggtgcaattaaagagaatgaatgagcaggaatggatttagggaaccagacctgggaggtttatcctagagaactgttagcaagagtgctgtgagagctttgaagtctgtccctgtcattctgggatgatggagagcacaattaaggtgggtaccacatgaagcttagcacagcataaatagcatagactttgaaatcgtacaaagctgagtcataaggttatttaacttgtgccaatactcggcttttctgctctgcaataggaagctaatatcgcctattctatagcttttgtaaagtgctctagtacatagaaagttcaccataagtaaagcaccagttattattattactgtcatcatcattggcaatagtgctctgttcacggttgtgactagaagaagggagactaataggaaactatttcagttacacagattatggtcatgatgtacaagagacaacagttatataaaagaattgtgggaatataggaagttatttatgtaatttttattcaatggaaaggacatcagtgaaaaaaatggttattcatggagaataaggtatttctgcaaataatgtctttaaaagtgtataaatgggttcaagattaagaaatctgagatctttaaaacaacagtcagaaaaatggacatgtataggtcatggcctcaagaaggacacagagagtgaacaaagtagagggtcgcagatgtggctgacaaggaacaatggaggggactaggaagggcttaataaatagttatgaaatagttatacactctagattttcgtttttaacgtatttcatacatagatcttcaattacttctagaccatttcctgttgttatgctttcaaagattatttcacttttactgctctccaaagcttcccattaactgtgtgacagtgtctgcctagcctcctctagtggagaatgaactcagggtcttgccgaacctctgtcatcatatgcctagttagtctccaaaccctcagggtttctgttttcatgcattccattgtgtgttatctaggctctgtcttttagttttagttttgagactgttctgtcactctcactcacaccctctatcttgctctcgttgaaattaaaggtctccttttcctcagctgttgctacttggactaccctcagctttccttagctgcctgtggttctttgcccagggctgagactcctgaacttttccccttctgcattaaaaagcccattggtgtcattgttgttgattgtccctttaatttgcaatacccttctttttcttagttaaataaaatgtgaagtaaaactatttttttaattttaaagaatccctaagtctttgttccttttgtgccactgctttttgccaccaagttagaaccttttagttaacatttgaaaggcttttttcttaaatccctttgctctttaaaatggcaaatgtagtattacaatgaactatgtatatgctgtggtattatcttttgaactacagagtaaagttctgaacacaacaactctaaaaatgttaatttaatttagtctatttagtgtactgatagaatagtccatttttactggatgactgttttggaatggtttgaggtaacatgatggttgggagaattttgctcagcaaaggttctgtgagtgttgtggtctcagaatctgagcagattggttcttgaatgagcacactttttggaagcttgggatgattgtgcttgtctgactacaaagaaaagcatcaggagtctcccctgtgtccagtgactgaaacttccatgtttgtttctgttatataaacacacatttggtcaggtacataaggaacttcaacacactaaaataccttgttttcttagataaataaaatgttaagtaaaacgtctttttttaaattttaaagaatccctaagtctttttccttttttatgccactttttaccatatatacatatacatacgcatacacacgtgcatatgcacatacatacatacatacatacacacgtatgtatgtataatgacaatttaagaatgcaggaattttgatcacaggaacacagtatacctacagagctcagtggctcaagagctggcaccaacacaagaacccctcagcatgatctgtggacggtcccatttgcgaaacccagacattcatgactctgtttgcattctgactgctgaagttgatctgtttctcagtgtgctgcatcaaggcttggaatcagagatggggatgggatatcctcttcctcatgcttgtgattttgttcaactccgagatcttcaaagtcccctgtgtgtcgtgatgctcagtgtcacaggagtatgtgagtgtggaagggcaaagcatgcacaacatatttcacatagttttctgatttcagtctgttgttggaaattattcactagatgaggcagctcaagggggaagggcatggtggttctgttgatagaatgatttttagcatgaagtctcaaataaatatgttatgggtttttttttgtttgtttttttttttacttttaagctctcctttgggaaaaatctccatgctttgctttttaaaaatgaattttagagtctagattttaagacaacaggcttttaggtgaattgagagtcacttgcaaacactgttctgcgtccttgtgtccattggctctcttcattttcctctgcgggccattagggtttccttgacacatttcttttcagggcccagcactagagactgttctagctttgagagaagaactagtgtgatgtagctctagtagaataacatgtcttatgaaattagagtcctatttcagtgttgagagagagcaagggcttacactgttctctcatccaccttctctgcctcacacagccccagtgacaagagaattctggacaggccagtgtttgagcaataaatgatttgatggtctttattctgtgactcattttcttataaaagtacctgggtttggagaagtaattaaagtttataatactttatggtggggcgtaaggatgggcaatgtgcaaaggaggtcaggggcttaggatatgtaatcagtttccacaaaattattgtgatgcttttgaaaccacaaaatgatcctcatcaagtaagtatctgtcatgacagccattacacacgcactgcagcaaaaattactatgtgagctgaagaaggaggaatcgtgcatgtctttctctttcatagctgcttagtggtttttgtatttaacttgctagagaaaatactgagaagaaaattgtcaagaattcagtaaaagattaaaaaaaaagaagaagaaccatcttgggagagaaattggcaagaagttattaaaaagttgggagggaaataagctgagaaatgagggtgttccaaaaaataaattccaccatagagattccacatgactaactgaatttgaatttgacctctggctctccatgttctgcatgactaacctatgagaaggtgagacttaacctttgaatagtcaacttaccaagttggataattcacagctttacagttagaagtaatgagaagataagtgccataggactcagcattgtactagctcagacataatgtatatctaaagaagatatttgaaacacattgaactatgtccctttcaaccagaataaatcacattgactataccgtaccatggactacctataatttactgattatatgtgattaggaaacactagatattatttactataacatgaagccaagaatacttatagaattactgaaccagaactaaatgggaatgccatgatattttatagtctgaactggtatttcactgcatttgagccttggaacttaaaaaatatgtactagctaatatttagggaaagagtatctatggcagcattgtgctaagcacgcgcatgaactggcccatggagttgtctcttctgatttatttagtgatagcttcaccaagagtttgcagtagagtgaaaatatgctgatttcaaaatgcaggctaggctttaggccctaagcgcatgaagttcccgtgctaattatcaggttaacacatcagagttcttaagtcacaaaaaccaaaatagcaccaggatagccactcctagtgagatttgaagtcaacagagcagtagcttatgaacataattataactgtctgaacagattacctcatgagtagactgtgaaactatgacatgtaagcctgaccttcatatttaaaacaaaagatttaacaatagggaaacttacaaagataaaaataattttatacaaatccttattatgtgtttccagtttctaccttttttaaggtataggaaatccagattcagagttctccatatttagatggtgaataatattatttaaaccaagaaaaaaataaaatataattttagatgcaggatggcgctccgaagaccctagctaaacttcacattcgtggaaaatttgacattttaccagacttgtaactctatagatgttcacaaaagcttacccagagaaggaatcctggtgtttgctaaattgaatgtgaagtcttctctagataggtgaaatgttctagcattgacagctattagaagtaactccatgatgataggataagtgcttttatttatattgcttattcttggtttagattgatgaattaaaaagaaattgatatcagctgggtatgatggcacatgccttaatcccagcatgtgggagatagaggcagacatgtctctgagtttgaggtcagcctggtttacagagcgagttccaggacagccagggctacaacacagatggagcctgtagaaagaaagaaagaaagaaagaaagaaagaaaagaaagaaagaaagaaagaaaggaaggaaggaaggaaggaaagaaaggaaggaaggaaagaaaggaagaaaggaaggaaagaaaggaagaaaggaagaaaggaaggaagaaaagaaaagaaaaggaaggaaagaaaggaaggaaagaaaggaaggaaagaaaggaaggaaagaaaggaaggaaagaaaggaaagaaagagagaaagagagaaagagagaaagagagagagaaaggaaggaagaaaaaaaggaaggaaggaaggaagaaggagggaaaaggaaaggaagggaaaggaaagagaaagtgtgcgtgtgtgtgagggagagagagagggagagagagagagaaagaaagaaaggaaggaagaaggaaggaaaaggaaaggaaaggaagggaaaggaaagagaaagtgtgcttgtgtgtggagggagagagagagagggagagagagagagaaaggaaggaagaaagaaagaaagaaagaaagaaacaaaggaaggaagaaggaaggaaaaggaagggaaaggaaagagaaagtgtgcgcgtgtgtgagggagagagagagggagagaaagaagagagagggagagagaagaaaaaggagagaagaagaagaggaggaggaggaggaggaggaggagaaggagaaggagaagaagaagaagaagaagaagaagaagaagaagaagaagaagaagaagaagaagaagaagaagaaagttgttaatctcagcaacttttcactgagctcccactataagcacaatggtgcaataagcacagtagatgttgcctgcaggtataactagtaacttgtctatagtgagatttttgttacaaaaatttatagcaggatggcatatattcattcagtaaatatttttgaatatatgcatcaagctaatgattataccaaactctgggaattacactggtaagaaaggcacaatgcttgctctaaaagaggtttttttttttttcctcatagaaaagaacaattaaagattagcataggttaatgtatcgtatgtttcttagggctcttttatacattaggaagttaacaatgttctcctaaaagatgatggaagtttccccgcaaggaagtgacatctaagtgagagctgaatgaagaagcagaagaacattttaggaagggaacagaatgtacaagggtgcagaaccaaaagaagatactgtacccggcaacgtggggagccttgtgcatatagtagagtaagcatgggcatctgtaaaggaaaggctgtgtgaagaggggcgaactggggaacggaaaggtagtcacattctcagaacccattctgctatactcaggaactcagactttaaagcttaggagactcaccaaaggctttaaagtaggaggtaatgccacacaattacctttttcaaagatgttttcagttataatgtatagttatcatgctctcaattaaatgactagcaaagctgctggcagatagataatttcggttatctatctgagagacagagacagaaggattctccaagtcagggcccaccttgtctgtgtagtgagttccaggcaagctggagctacacagtgagactgttaaaacaaacaaacaaacaaacaaacaaacacaaatttaaaaactattcactgagcataaaatataagatgtaatagtgactatagtcaccatgctacagggtagatctctagaacctattcatcttgtctgagacattctgtcttatgaatacttctctatgatggtgctatttgctgagcaagttgacacaataaaagcattgtgcttcattatggaaatctggaagggatgtagaattgtgatgtatacattctatcaaaatgtatagaaactaagaagggcaaaaagtaggtaaggtatataagtagaatatttgtttaaaatatctaaaacaactaaacatgtaatactcgagctaattgataattaagagaataagcacaactgagtggcaataggaggctccgcggaggggatctcccaaaggctcagtgcagaagagcagagatgacttacagcacaacaaggccaatccatagagcaggctgttagtctgagctcagtacatgaagggcaccttcatttggagaattaagagaatgaaaataagatattacatatgaaaatataaggtcagtgtagtgggaaattaaagaattccatattcgttggaaagtttttactacgtttccttgtggcatcattgctttagaacaaaggacacacttagacaaggatctttgttctcagcttacattttactcaaaggagatagacttttcacaggaaggcagctcttgagagacaagagattagttgggaacttcaaaggtagtggggtttgaagctcttctaagaatctgagttataagagacttcataataggaaccagaaaataatttggggaacatagtctagataacacaagatgttctattgaagtatggtattctttcccccaggcattagagttgtcctagcattagggataggtatagttagaggagaaaataaggaattgtaccacttaaatatccatactgccaatgccataggagttatttagagagtttccttgcatctgagctcgtgctatccagaagtctatgactaaatgagtctgaatgaggcataataggattacagacactgaatagcatttgaaaggatttttggctggctggctggctggttggttggttggtttcatttagtaaaagccagagaaatccagttcccatatcattctctagctgtaggggagttcaggaatcccagcacttttctatttctggacactctttccctgcacacataaaatcactgcactctacagttcctctcttaagaatgcttgagctatccattctgaatataaacccagatctataacacaaggaagtacacaatagcaatagctatatttatattcatacatacacacatgaaaactgattataaaacagtttagtttgtgttatgattttatacacacacacacacacacacacacacacacacacacacacatatatatatatatatatatatatatatatatatatatatatgctctcttctgtatgaggatgtgtgcatatcatggtaaatgtgtagaggtcagatggcaacattgggtactgagctttactgtctaccatgtttgaggcagagttgttccttttgttgctatatacactaggctagttggcttgtgagctactggatctcaggcagttctcctgctctacttttcatcttccagtacaggcataatgggattacagacactcagggcgtctagttttaatgtggatcctggggatccaaactcaaattgttgggcctgtgaggcaggtgctttatcccactgcaccatctttccaggccagagcctttagtgttgatggcaactactataacatcaatatttatatttttctttgttataataaagatgatgttaagtgttttttttttctgctataaacttggttactattcactggtgaaggtaaatctttttatctttaaatcgatgaaaaatcttacaccaccatcctttttagcagagcttagtcttttgaaaatgtttcttcatgcagctatttgtaataaagtttgacttatgtcaacaacctatcttatttattagacataagccaatttaaatgagctccttagtgtctgcattctgttatgaggcttacatctgtggatctctgtcagagtctactaggtatctgcttaccacactcaaatgtacaataagctatgtagaaatgatcactagatttttctctttttccagtgctttcttggctgcccattttcccatcctgacttcttcctacctgtttttcctacctttctcttccattggctatcttctgtatgcacaaaacaaagcagtgttttgtgctttttaagccttattaacaatggcattaactatccagtgattcaccgttagagatatgctttattgagcagcattcccctgaagttaatgttcccttaaccctggcttctcactgtgcccaccctcttcttcccacaagcgtctgtattgtcaaggttgttctaaaaatgataagccagccatataaaagtttatggtattttcctatcttcaaagctacaggaagctcaaataaactcagcaaatattgctcaattacacaagactattaaatgtaacaccccacccttctaaaaagcacctcctcttctatatctttcccttttctttcttagtataacagcctagatcattatggctctattgtgtgatcaggtcagagcaaatgaggttcatattaacaagtttccttaataacttctggcttgtttgatatagttgaaggataccaagatgataaattctaaatttctaagagaagtcagtggtaaatgtgaataaatggaacataccacaataagtatgttctctagtccttaatgataaagtaagttaatctttattgcacacttattatagtattactttgaccctctccagtgtgcttatctcagcgttttcaagtgttttacaacctcaaacacacacattgtgttgtgtgcacagtctgctttgaagttgacatttgcctttctgacgaggctgtaataaaggaagtcaaccacctgagagaacaagtgtcagatgaggatttcaggccctggcgagcaccgctgttcagggttaagtgcagaaacccaggttccttccagatgcctttgagtcaccacaggtgcagcaattttaaacaaataaagtttctgtgaattagctcaagagcctcaccttagtttggcagatatttgatgttatttgtagataaactacaccgaaaaaataaataaaatatcaaaaaattaaaataaattaaaattgggaatagagaataatttgaaagaaaagttaataatgttctccttctataagagtagtctttgattacataagtttatatttcaggataagacagttttcttttattaaacaaaattcttctggacacttaataagcatgtgcaagggcctctatttcatccatagcaccaatttaaaaaaaaaaaaaacctaaacgaaaatccaacagctaattttatagaatattttatagctaattttatcgtcaaatattatctaatacccttgtctaggacccttattccaatagatgcatttcttcaaggagttttatggataaatgcccctcaccccccaaaaaaaatttccagagaattttcagtattaacaaagaaaagtagcccctgtagctgtgtgccaggcttcctctaaaagccacgtgtgctcgtgcagcattctaaagagctcacaacacaccctaatggatggtcatgtacccatgctcatactgggcaacactagttgaactaaggggattattgataaaaataaaaagacaaggtttgagtaagaatggggtaaggtgtagaagggggcgttagagggaggaaactgtgggatttatatgatcaaagtgcattgtataaatgtgtggggttttcaaaaagaatatatgtatatacatatatttcaaaaagaatatctatgcattatctatgccattaacaaaaaccaggaaaaaatggaagggatggatgaggagggtttgcagggagggagggaatggataaatgtaattatgttatagtctcagacataaaaataaagattaaaaacaaatcctcatgataggcacgagtgatataacagtttttaaattgtgatttttacaggtggggaaaatctatgaagtctgaaaccaacacccttaagataaatatattaccagatttgagtatccttagtagtcagcaaaggtcaatgtttaacgatgcatgcaaaacagagtgctttgttttaaatcaaacagaatgttaagtactcataaatttgcagacggatgaggcataaactgagtaatcaaaccaagtgctcagattaaaggaggatattggcgtgctgatgtattaggctgtaatgagtgcaatctcagtagatccccgctgcctgtccctcatttcactctcagcagcatgaaatcttcactcacggagtgaaagttacccatatttctcttcacgagtggattcagtccataaacaacagttcaaaccttggctcagtaggcagatctactttcataccattgaaagtcaattcctagaaataatatgttatagaagagaacatgtatgtctcagtgttcttattttgttcaatgttaaaagcctggatagcatcaccaaaactgtgccacaaaactctaagattcagcaaatagaataatgaaatatgtatttttccaatccatttaatacaagttacacccatatatgcagttcagctttaaaattcacatacagtataatttgcacacattattctctaacttattcagttcccgttatctttttaagatataacaatacctatatacatgtttatacactaatttagggatgagtgagtgtgtacatgtggcagacggctcagatggaggtctgcagtgtcagtccttcatccttgacggccattaatgagtgtttgctgggaggagaggtccttggtcctgtgaaggctccatagatgcctcagtgtaggggaattcaaggtggggggaggtgggagtgggtgggtggggggagggatactatcatagaagggggggtggtatagggggtgtacgtggggggggaacgggaaaggggataacatttggaatgtaaataaagaaaaatatccaataaaaaaaccttcctatcagtgactttaatctttttggtcattctgactcctaaatcaaaatttctattattttgtctctattctatttagatgaatatgtaagagattataaatatactttcatgtttattaactatcttgatttcctaacatttaaacttgaacactttttgtaagatataatgatggataaaatatgtattatatagatcactgctataggaaacaattgaatgaagagtccagttttgttttgaagtccttaactgagtttgtcttgagactacctctacattcatgaatgtttccggcaggattactaaaatagatttctattttgaaaacataagaactattagctaatttttgacataaaaatcaccaagctgctttgccaaattctcccttggactaaattggtataatattctcccataccaaccatcaatcctactttaggatcagagttgcagtgggctcttcagactgcccatctatcctatgtgtttccttttccacagtatctcccccaattaaactcttggacatttgatatcatgttggaatctggttggagaattttgactgatagctgcatatattacattatcatcttctgtagtgatagtttttcttataattttatatagtcaattttatctaaatgccattttatgttttgacatttctgacttctcttaaagatgttcgttagagcaaaaaataaagacattctgtcctaatagttttacattttcatttatcaagaatatgggttattagaattatatggtgtgcagttttatgttgacattttacactcttaattaaaatataatggctgcttttcccgctccccttccttccctccattccttctcatgtcccttctctccaaacccttccatttcacctctctttcaaattggtgtcctctttattgttgttacatgcatatgcataaatatgtaaatactcatatcttagaattagccaagggtggtttaactagatggagggcatgctcaatagtgagattttctatttaggaaagtaatgtgatatatcttaatcatagaaacttttaatatcactcttcttcatcctgatcaaagtggtcagaatacagatttctagatttctttgaacaaatctactctactttgaagaaatttagtccactgtttagtttctgttgaaaaagaaattgactttgcatgttagctctatgatcaaattgtagacaaacatttaagataactagctcttccttacagaaaagtcatctaaagatataaatgggaaacaactattcagttcacaataatggcaaaccttaaagtatttagtgattgttatagctctcatgggacatttacagaatatgaagaaaatgataaatctattgaagtattgaattcaacatctgaatcaggattaaaaaacattttgatttagtgttgcaaactagaattctatgtaagtgcaaggtatttaaaagttgcaaataaattctaataaggttatcttaaactaaacttaatataaaatcttagaagtaatttattgacaaattattttggtggaatttttgcttcatcatatgtagacttgatatcatggtatttgtacttcttatatttgaaatgttagtgaggaagaattactgcattaaaattgttcaagtcagcacttgagactatgttagctcatcttttaatgatatattatttcaatagttgacatggctactatgtcaaaaactaagaaagccaactctttcatgaggtaggattatattttatcagatattaaatgatatataatttcatttaaaatcaaggacccaaaagtccagaaaatattaatatagaaataaaaaaatggatcagaaaaataagagaacccagaactaggaaccatgacagatgatagaggcatcagtaaaccattcatttgatgattattgttgccttgtaacaaatgaaagatagggtagacaaatagaaaactgtgccataagggttttgaacattttattttgaaaatagtattcaagataacacatatagctagctggtggggagtagatacatttatttcacaaaatctttttgcacatgataagtgatatgcacagtgaaaaaaagagaaacgaatggagttttttatatgcagcctataaagttgcaaaaactacatacaaatattagacacttcaaagaagaaaatgcaacacagcaaatatttaaaatctttgtgattaagaaaaatgtaaatgaaaagagaaaattagcaaaaattatcataatcatactagtacaacttagtaaattgtaatttaactctttagttgctttgtaaagcaatctggtggtaacttttgaaagtagaacatatgcatttgatatagtcatcctactcatgagaatatatcttccagctacagatcacaaaagcatatatgtattcagtgatattaatagtaggctttgtagggaggaagtggggagcaattgctagggaagaattgcatgcctcaccattttaatgtagtctggactacaaagagaaaccaatgacttcaaatgaaccacctggaagcagcttgcatggatcagctctcttgtagtattctgttctcacagtgttgtaagtactgaaacatttatttttctgagtgcctcaccttatagtgtgtcactcagccaagagtatggggattacaaacactgtttgttctagtggaaatctcacatctgtcattacgtcatcatcttcaaaacaggagggagtgttttagagacgtgatggtagtgaacctgaatccccttcctttttcctttctttttaaaaaagcaataaggtaacagaggaaataaatataaaattgtatttactcttgtgaaataaaatcaccaacaatctgtgctagctagtttttatgccacaggtagagttttatgacatgagctagaataatttgggaacagagaagttcaattgagaaaatgcctcaccagattggcctgtggacaagcctatgggaaattttcttggttgaggattgtgggaggtcccagttcatgatggttggtgccacctctaggccagtggtcctgggtgctataagaaagcaggctaaggagccacatggagcaaatcagtaagtagcactcctccatggcctgtgtttcactccctgcttccagattcctgcctgagttcctgcactggcttccctcagtgatggacataaaagttgcaaaatgaaataaaccctttcttccccaagttgcttttggtcctctgttatcacagtaacaaacaaacaactaacaaagaccccatgtctgcaatggtgtatgtgggaagtcactgatttatcccaagtctttggtcacgctgtcaggaatgcttgttagacggggttccttgttaaaagtgaatagcatggcaatctaaggaggtgatagaaaacatgagagggggctgggaggagagaatattaaaggaaattggtacctaacttgatcacattttaactactcaagtgaagctcttcatggaaggcctcgaacattctctctgtggtgtgtgctttattcctatcgtctaaataattaacatgccatgtatactgttgtataatacgttgtaaaattgttttttaagaagttagattgttacttaattctcgctccaggattagagcttatcttctaaattaggtttacactgtctggagtcctggactatttcttacaaacccaggtcgtcttttactgtgccttcatagttgttactacagaaaagatcattattgggcaaggaatggcatatgtgacaggagaggagtagtaagtggacaaggacagaaaaataatggaagtggtgaggatgtttgtgttgttgtttgggaagatgaatgaaagaatgcggaaataaactgacatgtcccgttgttagccactgaagaatgtggaaataaactgacatgtcctgttgttagccactgaaggttgcctgcatgttttctgtgggtgtggagagttttgttttagcttttcttattaacaggcttattcagtcttttgacactttttaaaagtgattttaagttgaaagtatatttgaatggcacttgagtttatatgatgggcttatgggtagtctttgaatataaacattccccaaataaatagttgcatctgaagaaaaatgttcttttcaattttggattgtgcatgctaaattttatttctggtgttatgctttggataataggacatcaccaagtttgcagaacaagacaacacagttcttggagaaggtggagtcacactgagtggaggtcagcgtgcaaggatttctttagcaaggtaaatatttaactgttggtcttgtgagcacttgctgtaaatactatgggtttttaattatacatacacatttctcttctgcttcctgttctgtctctggaattgatgctttttctttaagaactatagacattataatattcaaatttggtaaagatggtggtttttttttttcaaaatgtatacttttcaaaatgtatactcttatttatatttgtccaaacttgttgttatggtgcatggattgttatgaagagaaaagtatagaattctaaagaaaaaaagaaaaggaaattacaagtttctattaatcccccctttttccctgtccccagatgcctctgatttgaatttctgtttattcttctaagtttagatatacacattttcaatttttaatttttagaacataatctatgatagtataacaaaaataggaaggtaaatgatgtcactaaggtttctcatttgtttacagacaaaggacaaggtctccctatttagaaattaggatctttctgtgtttgtttctgtatactaggatgaaagtgtgtgccaccacacccggtaagctttatactgaatacatgctttcatttgtgatgctgattgtcctcatggtcatgtttaattattgtcagaacgaaagtattttatttaaattgtagcttccgtttaaagacaattggtggtatgggatttcaaatgctctctaattttattgaaacaaaattcttactacattaccaaagctgttaatgagaaattacattggctcagtggtatcttggtatcttggccatttatcttccatctcctggaaaagtaaacactaagtatcacaactgatccttgataccattccttctccccctccctttgtctgtgtgcctgcctgtctgtctgtctctgaatgtatgtttatgatctcaatccccatacaagactagaagcagaaattgttttctttattttatggaagaaatcacaagataattgaggtagtcagacattaacttgccaaaggccacaaggaaatgatacagtcactatttaatcaaggtcatcttgactccttacattaaactatgcttcggtctggaaaatacactgcgaaatcagatcaatagatagaatttccagacaatggcttcaaaatgattggaagctaattcccttatctgtgtggcaaaagtcatatcttaagcattccatttgagttttaagtaaaatatggtatgtgacttcagtatagtattaacatttactagtttaagatttagtcatatttgctatgtacaatatatggcactactcaaaacagttgtctactatttttatagttgcacatgttattctcatttacatatgcaataaatatgtcatccacttttatatgaagaatatacacattttaatcttgagaaactggccacacatgtgaatgagagtttttaccttggttttgcactaataatttaccaatatattcagagtaaattttacagaaaatcactttttattcccacttactgtttaaggtaaaggagtcatatccagtgatggcttcttgttggcagagtcttgagacagcacacacaaaaaaatcatatgtcaagaaaaaaaaggaatgtgtgtgtgttctctgttattcctttcctcatgaagccaccattatccaatcatgaaaccccaccttgataatcttacttaatcctcatcattttgcaaaatgaccaccaacagctttgctgttggactaagtttccatcttcttcctgcctctgatggatatgaaatctatattagtttcagaatggacaaatatatttgattatattacagagaaataaataaaatctaaatgttgataaagacaggagagttcatttttatggagtccattagctcttctgtttccttccagacaatttatagcataaagggcttgtttgtttgtttgtttatttttattctttaatccttttttacagttcagaattcatccccctcccagtctgcccccgactgctccccatcccatacctcctccctacccctaacctccatcgccaagaggatgtccccaccctgagcataaaagagcattatgacttaatctggaattttttttgctatttctattttattcattgtttttcttatttgtgatgattaagtacattttaaaaacaaaagtatcaataaatagtttctacagcatgtcctctgtaactgggatagaggtagcattattagtaatcacacttgaaaaaagtaagatgtataaagaaattatttcctttttgttagtttggaaaatatacctttatatttttcctattgtaagtcaactcaaattgtttttagtttcaatttcaagtgaaataagagctggggagagatagctcattggtgaggagcgctggctggtcttccaaaggctccaggcttgagtcacagtactaatctgcttcacaatcatctgtaattggtaacccagcacacctgacattttcttttggtctccataggcactgaacacacatggtacacatacatgtaggtaaaaaccgtcaaacacacagtacagaagttactaacagtactccctgtgctctgtgctgtgacacgtgtgctttcagtacatggttttgatgaccattgtataacacaagttctgtgtttaaaatatctattctcaatgacgtaaaagatcttgagggatcctaactttctttccattttgtttatagagcagtatataaagatgctgatttgtacctattagattccccttttggatatctagatgtttttactgaagaacaagtatttgaaaggtatgttctatgactgagttacttataatgctcatgttaaaagataataaatgtctgtttcaccaaaggctgcatattagcatattagctccagagtaatatccactatttctattgctcaaaacatcaggatctagcacagtgcttattcagtcctggcatccccttaatggtcaagggtgaagttgcttctgccacacccttttctgatgatcacatctgaagccaatttcttgattgctatcctgttctaacagttgatatttaagaatcgtttatattttgctatcttgaaaagtcttccagtattttaagtagtttacttttaaaattccacctaccattctgtattagtatttttattttatgttgttttagaaagaaaataatgtttattggtaaatgcccatactgtacctctgtcttagtcctctttagatgcccctctttggtcacagagaacatagatatttccttaaagtttttattagagcccaaatgggtgtaaaatctctaagaggtaacattagttataccatttgatttcaaatgttaaaataattttatgggcaacaaagtagcttattagaatagacattatagcactctagaaacaaatgagtttttgttttaaggatagaatgtagtgtgtgtgttaagatggtttgattatttattgatttatttcaaacttttactttaggacattgtgctaaagggttgaaatattctagagccctgcttattgtgtcttaaaatatgtggaataacatgtttcactaatggactttactgtacttacacatgaagccagcaggtctcagtcctgaagctacttttattcagaggtggaatactatggcatgtttgttttgacattttccgtttacgtttctgttgcatggtgtttattagcatggtttatccggccacaatcccaagaacatcgtgatctctgaatgaagggccaagtcccaacaatgccatctctagcccacagatcccagtcctcattgttgctcataagcttccgatcaaatctatagtgaagaagtccttatatgacaatgtattttcatagttcccttcatcttctcttgcttattctaatctaatgcaaacggctgtagaaggtcctagtacatttctgcctcccgcaaagctttttgcatctccttcactacagctgtgcattaacattgtcttctgagtctctaaagttgttttgtaattcccattgcatcaagttctctgtgtccattacagtctgaatgctgaccacttgaagcatataacactctgtaagacaaacattttcttcttttattctttcttttttctctttcttttttttttcttttttcttttttttagatgcaagctggctctcttttccctgatgattctcaatattatttattcttcaacttgaggttaataatcagagagagcctaaacattgtattttatttactaaagctacatcattaaggctttgataattgttaattcatttatttattcactttacaaaactcctctcctcccagtatcaccctcacaaatttgccccccccccccatgagtcttctcagagaagaggatgtccccttggccgttggatacctgccagccatgggacatcaagtcacagcacaagcctatcctttcccaatgaggcctgactaagcagctcagctggaggaaggtaattccagtggcaggcaatagattcagagacagccccgctgcagttgttaggggacccacatgaaggccaaacagcacaactgctacatatggtttagtctctgcaggctctctggttggtgcttcagtctttctgagctcccatgggcccaggttagtatactctgtaggtctttgtggtgtccttaacccctctacctccctcagtcctatcccctactcttacaaaagactcccccaaatctgcttaatgcttggctgtggatctctgcatctgtttccatcacctgctggatgaagcctctaaagagacacatttgctagggttctatgtgcaaacataatatcattaatagtgttgggagttggctctctcccatgggataggtatcaaattggaccagacactggtgaacttccttcaatctctatattttttagtatttttttttatattttattatctgtaatcatttttttaaagtgcagtcgttatccccctcctgttctgccctctgacagttcttcatctcattcctcctcccctatatccaagatgatgtctctacacccccacacatgcccacaccgcaccagacctccccattccctggggcctctcaagggttaggtgcatgcatcttctctcattgatgccagaataggccatcctcagatgtaaatatgtttcccaactagtgtatgctgcctggtgggtggctcagtgtctgagagatttggggaagttcaggtttgttgagacagctagtctttctattggatcaccctcttcgtcagattcttccagcctttccctagttcaaccacaggggtccccaacttctgatcattggatctgcttctgtctcagtcatctctttgttgggcctctcagagggcagccatgctaggctcctgtttataagtacatcatagcatcagtaatagcatcagaccttggagactcacgctgagatggctcccagtttggaccagtcagtggacctcctttccctcattcttttctccatttttgtccctgcagttcttttagacaggaataattctaggtctgagttttggattgtacaatggcaaccccatccctccatgccctgtctttctactggaggtggactctataagtgctctctcaacactgttgggtattttacctaaggtccctttgagtcctgaaagtctctcacttctcaggtctctggtatattctagaaggtccccccacatcccacctcctgagttgcctgttttcattcattctgcttgccctcagtgcttcactcctgtttcctaccctgctaatacctgaacatgttatgaaattcttaggcaaatggatgtcctcattcttaatagctgcctagtattcattgtgtaaatgtaccacattttctgtatctattcttctgttgtgggacatctgggttgtttacagcttctggatatcaaaaataaggctactataaacacagtggacttgtagcatggtgggacatctttttggtatatgcctaggaacagtatagctggctcttcatttacaattatttctaattttctgaggaacctccagatttatttccaaagttgttgtaccagctagcaatcccaccagcaatagaggagtgttcctcttattccacatttttgccaaaatgtgctgtgacctgaggttttgatcttaaccattctgattggtgtaaaggtggaatctcgaggtcattttatttgcatttccctgatcaaaaaggactttgaacatttctttaattgccattcaaaatttctctgccgtgaattctctgtttagttctataccccattttttttattggaagtttttttgtggaagttagcttctttagttctttatatattttggatattagtcaactatgagatgtgggattagtggagattttttccccaatctgtaggttgccaatttgtcctattgacaatgtccattgccttacagaagctttacagtttcatgaagtcccatttatcaattcttgatcttagagcctgagtcattggagttttgtataggaaatccccacccacaccccctaatccccaaatttctccccaacctccatggccatgagttcaaggctctttcccatttttcttttctgttagatttatcttatctggctttttttgttaaggttcttgatccacttggacttgagctttgtgcaaggtgacaaatataaatctattttaattcatttacaaactgactcccagttagatcagcaccatttattgacggttcttttttacctttgtatattttttgcttctttgtcaaagatcaagtatccataagtatgtgcttttactgttgggtcttcaattcaattccattaatcaactgatctgtctctgtaccaaaaccattcaggtttgttttttgttttttgttttgttttgttttgtttttatcactattgctgtatagtatagcttgaggtcagggtgatgatttcctcagaagttcttttattgttatgaattgtttttgctttcctgtttttttggtttctttccagatgaaattgagaattgttctttccatgtctttgaagaattgtgttggaattttaatgggtattgcattgaatctgtagactccttttgtaggatggccatttttactatgttaatcctaccaatccatgagcatggaagatctttccattttctgatgatttctttcttgagagacttgaagttcttgtcatgcagatctttcacttgtttggttagtttccccaagatattctctctctctctttcttccttccttccttccttccttccttccttccttccttccttctctttcttcctttctttccttctctatttctttctttgtttctttctctcattctctctttttttcttttttctttttttctttctttttcttttttttttcttttttttttttttttttggtgtttccctattttcattctcagccctgtttatccttagtataaaggaaggctactgatttgtttgagtaaattttacattcagtcactttgctgaagatgtttgtcagctgtagaagttctctggtaggattttggggtcacttatgtatactatcatatcatctccaaatagtgataccttgactttttctttgccagtttgtatccccttcatctccttttgttgtcttattgctctggctagaaccttgaaaactatattgaataggtatggggagagtgagcatccttgtcttgttccttattttagtgggattgcttcaagtgtctctccatttaatttgatattttctgttggtttgctgtatattgcttttattatgtttagatatgggccctgaattcatgatctctccaatacttttaacatgaaggcatgttatattttgtcaaatactttttcagcatctaatgggatgatcatgtgatttttttctttgagtttgttgatatagttgattatattaatgtattttcttatattgaaccaaccttgcagccctggaatgaagcctacttcattgtggtgaatgaccgttttaatgtgtgcttagattcagtttgctttatgagtactttctgaagttcttttgttgttgttgttgggtctgtgtatagtttagataacagagtaattatgtcatcatagagtgaattaggtagcattccttctgtttctattttatggaatagtttgaggagtgttggctcttctttgaaagtctgtgtgatgccttcttagcagaaaggttgccacaaaattttacatgagtctttctatgtggtccagagcacaaagtacctttgtctgaattacttgttcaaatcttccaggagccactgtactgtttttgtttgttcagttgttgttttcctttatatataataattttagcttcacttgtttggggggagctcctttgtatctgtagaacctgcatagtgccagaaatatgaactagcactgtagccatatgcatttcagaagtctgtttccagcaggactctagtttaagacaaagagaaaattccattaaatgaaattccccccttccccaatgctatttttatgatgctctgactatagttgccaatgtttactgtcataaacttacctaaaattatattatttatacttaagagaatttaatggttcttatttttttatattttaatggataaaaggaacagattttccctgtagtatccactgcaatacttaactttttttttccttttccattttttattaggtatttagctcatttacatttccaatgctataccaaaagtcccccatacccacccacccccactcccctacccacccactccccctttttggccctggtgttcccctgtactggggcatataaagtttgcaagtccaatgggcctctctttccactgatggccgcctaggccatcttttgatatatatgcagctagagtcaagagctccggggtactggttagttcataatgttgttccacctatagggttgcagatccctttagctccttggctactttctctagctcctccattgggagccctatgatccatccattagctgactgtgagcatccacttctgtgtttgctaggccccggcatagtctcacaagagacagctacatctgggtcctttcgataaaatcttgctagtgtatgcaatggtgtcagcgtttggatgctgattatggggtggatccctggatatggcagtctctacatggtccatcctttcatctcagctccaaactttgtctctgtaactccttccatggatgttttgttcccaaatctaaggaggggcatagtgtccacacttcagtcttcattcttcatgagtttcatgtgtttagcaaattatatcttatatcttaggtatcctaggttttgggctaatatccatttatcagtgagtacatattgtgtgagttcctttgtgaatgtgttacctcactcaggatgatgctctccaggtccatccatttggctaggaatttcataaattcattctttttatatctgagtagtactccattgtgtagatgtaccacattttctgtatccattcctctgttgaggggcatctaggttctttccagcttctggctattataaataaggctgctatgaacatagtggagcatgtgtccttcttaccagttggggcatcttctggatatatgcccaggagaggaattgctggatcctctggtagtactatgtccaattttctgaggaaccgccagactgatttccagagttgtgtacaagcttgcaatcccaccaaaaatggaggagtgttcctctttctccacatcctcgccagcatttgctgtcacctgaattggtctattcttattttcttaaatgttattggctcaataagtagctgcaactagaagtcaagttgtatcctggactttgggcacaaaaaaagttatcactttccaactaannnnnnnnnnnnnnnnnnnnnnnnnnnnnnnnnnnnnnnnnnnnnnnnnnnnnnnnnnnnnnnnnnnnnnnnnnnnnnnnnnnnnnnnnnnnnnnnnnnnnnnnnnnnnnnnnnnnnnnnnnnnnnnnnnnnnnnnnnnnnnnnnnnnnnnnnnnnnnnnnnnnnnnnnnnnnnnnnnnnnnnnnnnnnnnnnnnnnnnnnnnnnnnnnnnnnnnnnnnnnnnnnnnnnnnnnnnnnnnnnnnnnnnnnnnnnnnnnnnnnnnnnnnnnnnnnnnnnnnnnnnnnnnnnnnnnnnnnnnnnnnnnnnnnnnnnnnnnnnnnnnnnnnnnnnnnnnnnnnnnnnnnnnnnnnnnnnnnnnnnnnnnnnnnnnnnnnnnnnnnnnnnnnnnnnnnnnnnnnnnnnnnnnnnnnnnnnnnnnnnnnnnnnnnnnnnnnnnnnnnnnnnnnnnnnnnnnnnnnnnnnnnnnnnnnnnnnnnnnnnnnnnnnnnnnnnnnnnnnnnnnnnnnnnnnnnnnnnnnnnnnnnnnnnnnnnnnnnnnnnnnnnnnnnnnnnnnnnnnnnnnnnnnnnnnnnnnnnnnnnnnnnnnnnnnnnnnnnnnnnnnnnnnnnnnnnnnnnnnnnnnnnnnnnattcttctacatgataacaaccagttgtgccagcaccaattgttgaaaatgctgtctttcttccactggatggttttagctcccttgtcgaagatcaagtgaccataggtgtgtgggttcatttctgggtcttcaattctattccattggtctacttgtctgtctctataccagtaccatgcagtttttatcacaattgctctgtagtaaagctttaggtcaggcatggtgattccaccagaggttcttttatccttgacaagactttttgctatcctaggttttttgttattccagatgaatttgcaaattgctccttctaattcgttgaagaattgagttggaattttgatggggattgcattgaatctgtagattgcttttggcaagatagccatttttacaatgttgatcctgccaatccatgagcatgggagatctttccatcttctgagatctgtaggaaaatgttattggaggacagtcaactttattaggtatttctcagttgtaatgttttatcttaaagaaaacagattagtcaacataaaatataagagaaaattcattaaaaactaaaaatagaaaatctctaacatcttagaagttatatggacatataaactttaggaacatataataattcttttattttctagaaaaataaatcaagaccaaagagaaaatgatttggttaaaatcagatacttgattatttaaaattgtatttgattttatgtctgctagtatttactttacagtaagatatgctatttcatactgcaattcatgaggcacctaagagttatgatggagtggttatttgtataagtgtattaaataaagcaataaaatgctatgatagattttatgcaatgaaactttatgctgaagttaaatatacatcactatttatgaagtaatatcttatatcttttttatatttccaaagctgtgtttgtaaattgatggccaacaaaactaggattttggttacatctaaaatggaacacttaaggaaagctgacaaaatactaattttgcatcagggcagtagctatttttatgggacattttctgagctacaaagtctacgtccagacttcagttcgaaactcatggggtatgatacttttgaccagtttactgaggaaagaagaagttcaattctaactgagaccttacgcaggttctcagtagacgattcctctgccccgtggagcaaacccaaacagtcgtttagacagactggagaggtgggagaaaaaaggaagaactctattctaaattcattcagctctgtaaggaaaatttccattgtgcaaaagactccattatgtatcgatggagagtctgatgatctccaagaaaagagactgtccctagttccggattctgaacagggggaggctgctctgccgcgcagcaacatgatcgccaccggccccacatttccaggcagaagaagacagtctgttttggatctgatgacgttcacacccaactcaggctccagcaatcttcagaggaccagaacttctattcgaaaaatctccttagtccctcagataagcttaaatgaagtggatgtatattcaaggagattatcgcaagatagcacactgaacatcactgaagaaattaacgaagaagatttaaaggtatatacccgtcaagtcttaagatacatctcatcctaaccccataattggagtaaattttgtcacatactatgtatttcatggcatcccattgtggtctatgggctaaggatacaaagtccattacctgtgtaagcaacttgaaacataaaactatttctggttatcattgaaatatcatccccaccccacaaatgtgtggtaagccaaaacagggcctcagtgttgagtttttctactagactcatgaaatgatattcacttttataacttaataattgtctcctttagtgtttttctaggaaaaggcggaatagagtattatataaacaaatacttgcatttatgtagacaccaaaaagtgtttttaaggcatggccttgataaggattacacacacctggcttcttgacaagataaattcacattcctgcctgcatttagttagcatatattttctaacctttcagatttgtgttgtgttttttaaagggtttctctaaggaagatatgtgcagctcggcatatattagtgacagtagtcagattaaagttcttaactctatgtgttaaggagcaaaacgacctctcttaaaatagaaagcagtggaaaacaagagggcgattgtttaccagtggatgtaccttagatgaagttaaagcagagtcctagtggatgatatatttaatggtgactgtctttaatataaagttaacttttgggcagttgcaattcatttagtatctctgggcctgagttcactctgttgtgaaataaaggaataagtaattctcaaaaatatatgctcgatatttctataatctaaaactgatttgctaaaagataattcatctatatgatttaatatccatctaaataaaattaccaaattgaagtatatacattttggtttgtgtgcattttaaagaatgctttctttacctgattttgttactaagttatcaattatttcaccttccaggcaacacactttttgtctccttcactgtgacatcattgtccctattaacaaagaaataaaataaagttctgagaaattcagtatcttcatacattcaaacatcctacgatgttaccatttggtcttgattttaaataaagggcagtttagttcaacaatctaatttttaatcagtaaaccttattccaggttaataggcttccttctttgtgagtctaatggcacttaatgaacttcatggattttatgagggcatcgtttccctttagaatatatagactctctttttctcacatttttataatgtagcttccaaaagacaaaggcttttagaggctgtatttggaattggattttgtaacttaagttgtagctagaaaagcaaccatgtaatgcctaaggactatacaaatataagccagcttctaaaatagaagactcaagtagctagcaaattctacattgcccttgtctctggctcactgaatcaagctcaatcatgaagagtttgggagcttcactcatttgacaaaaggtgtgggctgtaaagcatttacatgctaaggtttgggaagtctcactgtgtttggtactttataaactatattgcttgagcagacatcctattctctgtggccatcatcacccgtggcatttttagtggcttttattttttaaagatccttggctgtaaatggtactgttcccttatttccctgaattcataataaaagctcagtggcagcatggagtaggattgtctcagaatcacacttcttttctcaggagtgttttcttgatgatgtgatcaagatacccccggtgacaacatggaacacatacctacgatattttactctccataaaggcttactgctagtgctgatttggtgcgtactggtttttctggttgaggtaagtatgtttgtttggaaattgtcactgtgagtttaaatttaggataaaaaagctgtatgtattcatatgagcatgtacacatgtgtatgtgcatgtgtacaacggtagtttcctgtaaagttcatcgcttctgaaaaccaagaggagctgacgaggcagctatgtggttaagggcactggttgctttcccagacaacctagccaaattcccagaccccacatggtggtttacagcatctgtaactgaagtctcaggaacctggtactcttttctggcctctgtgagtacaacatgtgtgtagtacacagatgtgtgcaggcaaaacattcatacacagaaaaataagttaaaactttttaaaatccacagttagaattactattgatattttagtacttcagacataaggaaatatgcataaatacaaatgctatatatgatgaattgtcataaaataaaatttattgggaatattttttataatcagcatattttgattcataagtattgtaaagagattactataacaaaatcaataacataactatgtcatctcaagtaacattttttgttgtttttgtgacaaggggtcctaaaatccacacatctaacaagtaaaataatagtttgttatttataatcctcacatcatttattacacctccatacatttagtttttaacagattcagaagcccaacctacaaagagtgaatatgagttgaagttaagtactgaaaagaattctagatgtccatctagatgatctaatgaggcaggcagtgactcatgtggtaatgatccttacttgcctgctgtacctttgtctcaggcagtgttcatcgagggaagctttcacaatgatgtaattacttcattgtgtgctgacctgctgcacaagaatgcagtattagtcactctattatttttcctgttgccatgataaagcacctaaaagttaaggaaaggagatatatatgtgctttctgtttgagggaacatattccacagaggctgggaaggcatgatagcagaagtagcaggttggtaggtcatattgcaagcacactttggaagcaaatagtgaaaaagtggggccaggctgtaaacctgaaggcctgctcaagaaccgaaggattccatagccttcctaaacagcacagtagcttgagaccaagtattcaaacacaggagtctttagcacattttacatccaaatcatcaacagtcacctgaggggaaaaaaaagacattttgggaaaggaagtcaggggacaggggcagggttcatagtggacaaaattcaatgatgcacttgtcagaaaacaatctaatggtgtgcttttctttcttttcgtcttccttccttccttccttccttccctccttccttccttccttccttccttccttcttttcatttttgtcagtatcttataggcattgtccagttaaatagctctcaaatgctagattaaaagaaagcaatgatatgcacaattttacaactaaacaacatatttgctaatgtttatgttgttttccttcaatcaaaatttacatagactttgtttaagtctaaactttttttctttgtgtcagtgccaatgtgtagatttcttttggctactggaatgtttcttggtacattccatcatggaacaggtgccaatccacagtggcagtttagtttttaaagcactgtttaagtcctaagtgacaagaaattcccaaatgcatatcctcctccattaaagtgatttagataattttaagtcttaataaggactgtatttccatttagatttatgactttatagcatctcttctgtgtgtgatcccttttgtaataggaaataaactttgtggcccacgctgtcttttcttattccttcacagctacttaaattagtggtgggggaaataatatttctcagtcatgtgttattttgaaaaagtgtatattttgtattttccctcaaaagcaatgttgtctctaagttcttaacactgaacaaatagactaatatttctattgtgctgctctttctagtgccccttcttggcagtgtattatggacaagagagggaaaatgtaaacactggattaatggatgtttacaataacctgatggtgtgtagagtgcagcatctcaagatcctgtttgctccttggtcttgtggtctttaagactgtgtcaaaggcctgctgtgtctgtttgttaataaggagttgttttacatcagtaataaaatggagattatagtgaacttctataaaactacctttgctagtcagtgttagagtccctttagcacatcatctttattgtgaatgtggattttagggttatatttgtcccacaaaatatgtgaaaatctgcaaattatggtgtattacattccatgtgatatggcaccgtgtgttacctccccaccttaggaataaaaatgattattacttattttgttgctgcttcagcgtaatcctccaagagtacccttctttgaaaaattacatgaactttatatagtcttgaatcattttgaagtgaaataatagtgtgtattccattatctctttaattcccaaatatttttcctaaaggcttcctaccaagtatttgaaaaaatttttatctactgtagtcagtaaatatagcttggattggtcaatctatgtgatagacaagaaactactttgttaggatctaggcctccattggtaactacgtatttctcttattgcttctattcagagtgtgttggcagtgctggtgctgctgatttttctcttcttggatcaaaggagatgtaatggagaagtggctcagaacatgtgccccatctagggtctagagtcatttgattagtctgaagattgaggaagacttttctataagaataaagacattttaaaagcttagattattaccaggtttctagttttgcattaacttgagtcttaagacatcagaagtttttctttcttactgagacagtacacagagactatgtgtacattgagaaaacatgacaattaaaataataccattagatcttcatcatagaagttaataagataaactaaaataaaatatattatttaaacagacaacccttacctttcctgtatgattcaataaatagtgtttgtggaaaaatgaatgtgcaaaatgagagagtggaattccataagcttaatgtgctcttaaccaatagcaattgctgaagtgacttcagaggtgtaaagccaagacactaagagtgtgtgcacttcgatgttggtcatattgaatttagaaatgggtgtggaaggcttagataaagacgctagaaaaaaatcaactgtggattgttccattgcaggtggctgcttctttatttgtgttatggttgcttaaaaagtgagtatgccacactttatgtggattgtgttttgtttatatttagaggttataaactattttaatatatactatgttcattacacccttccatattcctgctgattatgaggggagaaaccatgtttcaataattcttcaatttctgaggagactgggtcccagaacaaagataccaaattctgcactcgtgctccatgtgtaaaactgttttttacacatacaatacaatagtattttgcatatagcctaggcatatcaccacatatactttaaaacatttctagatttatatgatgcccagtataatgtaattttcatgtaagtagttatatcctttagagaaatgatgataagaaaaataagtatgtgcgtgttcactaaagatgcaattttaagaataattttctcagtaaactgatggctgaatccatagatacacaggagatacataaggtttgctatatttgttcaagttgaaagctgttcagtgcctttatctcttcatttctaaaatatatgttgttttcagttttcatgaaatgcaataaaatatatgaagcaacagttcatatttaatagtttctactaattattttgttcaaataagaatcaattacatctatttcaattatgagaaaccttaacaccttttggcaatacaaaatttataaaactaagggtatagtctcttttaaagtcagcatttcatgtttccttatacttatttttattagtgattcacttggcaagtttggttgtcaaataatccttttcttttgttttacagcaaccctgttaacagtggaaacaatggtactaaaatttccaatagctcctatgttgtgatcatcaccagtaccagtttctattatattttttacatttacgtgggagtggctgacactttgcttgccctgagcctcttcagaggtttgccgctggtgcatacgttaatcacagcatcaaaaattttgcacaggaaaatgttacactccattcttcacgcccctatgtcgaccatcagcaagctgaaagcaggtacttgtgactaggtataaagtggagctgcccgcttgccatctgtgtggctcatcggcctgcctgccttcagtagcagcatgagcgggaacacaggcatctgcccctcatccaactaccttgtttggcatttctaagatactgcaggcaagcatacccatgctccccagcatttctgtatcagcctagtagagtaaattatcttgttacaatgtgatttgcgttcagtggactcacttgaagcaacctcttttggataacttgaccttctcacatacttatcttgatgggaaaaaaaataactgtttcttgtgcctcttcaagagtggtcatatgaatgcattagatgactttggggggagggggatagtttttaattattatgagacaattatagtacatgatccttgtataatgcatttgacaccgatttaattacagtcacagaaagtaagataatttgaaaaatagaaccaaacatttcaaaacctatggtaagaagggtctttgaaaatgtggtgcattgattcgcctctgagttagcttactttaaagaccatgaagataataagcctcctaagttctccttcactggagagcctgctgtgtgacactaagccagggaagtcctggcgcatacaaataattaaagtatcattcatgtcaggcatagaaattcaactaaatgtagagaaagctacagtattgagacctttttactgtaatctgtctaaaaatctcaaatgtgcatcagatttttttaggtgacaaaattaagtgttgatgtatgaaaaagattatatttatcctggagcccttatgcctcggcaaagggttgcctcatttgcatatgatcctggtcatcctcttttagtctaagaatcttaaaactaaggaaatgggcaattcactctttaagagaggcgttctctcacatttctggcagaattgaacatggacacgtggaaaggacacagacatttgaggcttaggcttagtttggccacacaccattggtagtaatggctgtcagcagcctacgtgaaatgaatattagcatatttctgccattcttttctgtgaggttgttgctctcaaaggaagtgaaccatcctctttctcccaaaatccactcacagcgccctctccgccctctctgttttccctctcagtgatcaccatacattcttcttttctcatttgtcttcccaaaatgtcatctgtgtctcaggttagttcctaaccactttatgctgtgttcctccttattcaacctcctggacctaagcagcaagatgacctcaagagatttccaatcagcctgcactcattatttggtagctgtggtacatatagtttgcttttaattaaaaaaagttattagattcatggtttatgattctcatctgatactgaattattctgctatactttgcaacaacttggaatttcccttggatgagctcttcagaattgtgcattgaccatgcttttccttgacagtaattttctcaggctttttttttcctgttactttctcccactttgtcatactcaaattgcgatcatacagacacataataaaggtcctcagcaaaatgcggttataatacacagatgctcctggttgaaataaaatttgaaatataaatatcactatgagtatactattttgcccaagcatactttcagttttaaatagttattacaaatgtcatggaatatacattatttctctgacttatttatggaaggatatccataatgggtatccatataatatattcataaaatatcctaaattaatatgttttctaatgtatcacatgtctgcataagactttttacttttgtctgtgggtcatataaaatagacatggaattatctatcctattgacttcaaaaatctcctatctgggaaaagagataagttatatgtacacacacaagcagctgtgatatacagcacgtatgtagtctctgcaactcaggcatacagacaaggacaggaagagatttttttccagatgcagtaaataccctactctcttgcagacaggctatttgaattgaaccaggaaagaggtacagatttgacaagaggagacagggcttttagatagaaaggaacaacacataggcaaagtaggaaaaggtagactaaagaagacatacttaccagaagcagtgggtttgaatagcaggatctaggttagttaaggacaaattatgggaaactattaaatattaaagaattttggactttaatccagtaggtaatagtgaacgagtgataaggttcactattacattgttgccatagtgttgtgttacactttatctgttggcttagctccttttttagaagatgaattcctgcactacaaggagaatgacttaatcacctccctgtagccagcattaccaaagcatgtagtagacatggaatttttagttcattgacacaacaatcaagactcaaatggggtgaatctggaatttagaatacaggttgaagcttatattcccagtgaagaagatagacaaaataaaaaaggaagtctggtgtgtactgagagagacagctgtgggttttggatcagcatatctaaatggcagaaaactccacagggagggtgtatgtgccctgtttggtggagttgaacataaaaaattgatgaaagcaccgccattaagacaccttgaaaccgagagcagcagaagtgaggcccaaggggtacgatgaccagacattcctacccttaattatagtaagaacttgattaaagacactgcttggagctgagtcgtaggggactatgtgttttataaaagttcaaaagtaggaggcaataacttaaataaatacatagaattctcaacaaagctaatatttgtaagttcttgaatttctgactagatgataattcttattttaaatgattttgctgtgctgtgaatttaggataaaatatattggtgtccttctaaaagtgattaatatttgagaatatttatttgtatcacaggtgggattcttaacagattctccaaagatatagcaattttggatgactttctgcctcttaccatttttgacttcattcaggtttgtaaagaataactattatcaagtttttctatttgccataaagttttgtgaataatttcaaaaggaagcaagtgaatttgttgctaattttccacatactagttgaagtcctggctagtgaataagttttatgaagaacagcaatgtttaatagtcataaatttagtgaattcagtaactagctatgtctatctatttcaggcatgccctggatatgatactatcctcttgaattggtttgaaaggtacaaaagacagttttccgcccaatcattgaccataaaatttgactcatagaacatttcttaagtccaacactgaaatgaaaatgaagttcctggagaggctacactctaatccagccatacccatgaacacttaaacacaaatttagctaagcagtttccccacaaaagtataacttaatggaaggatgaaaaatggattgttgaaaaaatgtgaaggaaaagaaatatttagagcctctgaggctctcccttagtgactgctgtgacagacctccagggtagccatgctatggagatgactgaaagtcacttaataacaaaagaaggccattgagtggagaccaaagtgaccatgaaagcatcacattaggactccaatgtcaaaggacttacaggagttgtaagctgatactcttgcctgttgaatcaggcagttttctgagctccctgttggcttcctgaagcttcagagagcaaatgcacttggagaagtagttgtaacacaacatggtccttgttggaatgacacagtctcatagcttgtcccttcccttctctttaaaatagtactgcatctctgaaaacttggaaaaaatgtggaactattgcccctgtatgtatacacacaagccacatcagcagatgcagagaaagcagctgttggttcacctcctctgaaatgattgacataattaaatacacttactgtactaagtgaactgtgttttggatttccttcattgctgtgtttaaagatataactttacggtagcagcacctactggaatttttttaacccaagttttgatttatgtactcaaaagtgttagtttatgtgtgtttctttagcatgagacatttgtttcccagtctcagaaaataaaccaaaggtccgtaataaaagtatactaaatactatatactaatataatataatgcaatataatatagtatggtcaaaaactggaatgtggatatctatctgaatctgcctacaaaagtcttaaaaatggtgcttgagtgatatatatatttatggtctcctaagtatctcttgttatttagtttatctcagaaatctgggagagctaattttcaaatatttatcttacaaattaaaggttatttgacatttgtgatggctttcaagtccttttatgtatcttaaacacttttatttcaggttctagagctgctaaagcttcatgaggtagcaaatctctcagagctttcttttgagctgagatctaccctgcccatttcccttcaggacaccagccagaaagcccatggaaactagtggagaattagcgtatgaaagttacactaagttggttttaaagttagcacatgtttgatgtcatgtggaccatttatttggtaaactgtagtgaggttgcaaacagtattctaattttctggggtgtaatacagtaagatgtctgcattgcatggcagaattcattttgatagtgtggctagaaaaatacttaatttcaaattaaatccatctactataaaccttttgagttactggagtatctccagttattacagtaggcataggtgaggtgagatataaataacacttattaaataatactcctttcaatattacatatgaaaaattagagtcagaaaagtgaacttgtcaacatgactaaacctaggtttaaaacagatatttgtaatttaaaatgttctgttaagaatgtttcattttaaacgactccaacaaaatcacaaaagataatatttatactaaaattattttgaaattttaatttttcaatggacaggatgaagaaaatcataatcatttcacatttacttcttataaaatttagagtgtgtgataaataaaaatatcccaagaacagaaagcaccgtgtaaagcttcagcagctgaactatcacatcagcaaactaaacaatttgaacattgtttctctgcagccggcagactgccttcgagctggcaccttattcatggatgcatgtttcctcactgagaatagtgcagtctaagaacgtgtgtagacacagctcagcaatgcccctgtccacttaacaaagtgaaaatgtctctcactaccatgttctctttgaccccgcagttggtgttcattgtgattggagctataatagtcgtctcggcattacaaccctacatcttcctagcaacggtgccagggctagtagtctttattttactgagggcctacttccttcatacagcacagcagctcaaacaactggaatctgaaggtacagcatggaatgcattgcaggggttcctggaagtgggtgagggggaccacatttactaaccactatactgctttaaatctctaattatataacagtggtgtgtgtgtgtctgtgtgtgtgtctgtgtgtgtgtctgtgtctgtgtctgagtagtagtagtagtagtatgtgtgtgggcatacttgctcgtgcaggcatgtgtgggaaccaaaggctacctttgtcaattgcttctcttcttttttcccttatcatcttctttctacttcctccttctctgttccctccctccctcccttccctctccctctctcccccctccccccaccatccctcttttcttccttcctccctttcttccttcccttctctctctctcatgagtttctcacagaacctggcatttgctggttcagctggactggctggccagggaggccccgggacccatgtgtcttcatctctagcattacagacattcagtacaggcccaaagtttttcatgtgtgcttggaatctgacctcaggttcttatgtttgtgtagcagacatattaccgactgaactctcccggcccaacaatgaaacttataaagtacgtgaggattgactttgttaactactatggctttgttttggctttcaaacaagtgtatacccttaccattgtgtatgcatagacatgcatacgttcttatactgctcaaagtcaaaaccagcaatgctatttttcctcagagtttctcccagatttcaagtgagactggatggaattcttccatttggcttatcgtcttcaggcctttccttattggcctggcttggttaatctttgctccatctccttaggaagcatctctttcagaaggaaccttggtgtgaggcaattatttttttaatattttttattaggtattttcctcatttacacttccaatgctatcccaaaaccccccatacccccccactcccctacccacccactcccacttcttggccctggcgttcccctgtactggggcatataaagtttgcaagtccaatgggcctctctttgcagtgatggcagactaggccatcttttgatacatatgcatctagagtcaacagctccggggtactggttagttcataatgttgtttcacctatagggttgcagatccctttagctccttgggtactttctctagctcctccattgggggccctgtggtccatccaatagctgactgtgagcatccacttctgtgtttgttaggccccggcatagtctcactagagacagctatatcagggtcctatcagcacaatcttgctagtgtgtgcaatggtgtcagcatttggaagctgattatgggatggatacctggatatggcagtctctagatggtcgatcctttcatcacagctccaaactttgtctctgtaactccttccatgggtgttttgttctcaattctaagaaggggcaaagtgtccacactttggtcttcgttcttcttgagtttcatgcgtttagcaaattgtatcttatatcttggatatcctaagtttctaagccaatatccacttatcagtgagtacatattgtgtgagttcctttttatttttaagagagtaaacttaatgtgtgtttctgctttgaaacttaggagctaaatcaattcacagaaattctacactgagagacttagagattgagtctcaaaagacaaaacccattttctcagcagttactaatttaggattagccaagaatattgactactcttagacaaggaaatgtgagttaacaaggaaagtggttctgtccactacctacctatctaccatggtcagcaggtaaaagggcagggccatgcactttaaaagtaaattccggtttcagtgagaagcccacaccatagatgcttatcgtgaagttactctggagttcatctttgtcagaaacatggtagtatgaaattctgttctgtattgcaagctgtacattatctcctatgggatgatttacaggcaggagtccaattttcacccaccttgtgacaagcttaaaaggactctggacacttcgagccttccgacgccagacttactttgaaactctgttccacaaagctctgaatttgcacactgccaactggtttatgtatctggcaaccttgcgctggttccaaatgagaatagacatgatatttgtcctcttcttcattgttgttaccttcatctccattttaacaacaggtaatctgaacttatttttttgtcagtgattaaaatgccatatgtttatattaaaatatttagatgattttaagtagacttgtagagcttacaagtaatttctttgcatttctgttgttttgtttctaaataatttatttaaaggtttatatggtattgttactagtttcactatttaagaataatgagacactgagtcagatagcaaatatgtgactaacaagaaaaatgtctttttcatgccaatgttggaaatctatatggggaaagaaaaacatatttgtatacacatgcacacatgtacacacacttatcatttcacacttcctgtaaaatttcttcacttaacaactacttattggtaaaattcttgtctaatatgaatttgaataaataaaaattagcatagaagtaaaataactgacataaaagtgcattatttttcaaatataaatgttctgaaatttaggatcttcaaggaaaaaataagtcacaataagaaaaattaaaatctatacagataaatgagtattttaaggtgctggatttctgagtcaaaatgctatgttacttatatatacaccattttattatatataaaatattgtatattatttatagcaaaatttcagagtgaatgacacatcaatgccagatttgcaacattatttgattataagaacagaattgctcaactccaatgaagcagcctttgacaagttatcaaattgtgtcatgcagcctcagggtgggtatcacacttgattacctgaaggaaccagcacaggcactggagagtcaggcataagtatgactcatgtagatactggtttctgttctcttcattccgtggatgatgcatttctttctcactctgtctctctgtatctctctgtctttctctgtctctctatgtcatatctatatctatatacacacatatataatattatataatatatttgtatataataaatgtatattatgtatatatttcatgtataatacatatataatatatacacatataacatatatatatatatatatatatatatatatatatatatatatgagagagagagatctgtgtatgtgtctccctctctcttcctccctgccctctctcagaataatagttatcttcatttaacaggaccataacacatgagcttcatgtgccatcttcattcttcttcttgaattaatggtatggatcctgtgtccaattattaaatcctagagaaggcaaaaaacatattccttctggctttgggcccactgcagattgacaactgctatgaggatggttaacttacccatatattgctttcttcatgcatggctatgaaatgaatctatatgtaggtatatttgtggatacacatatagtcattttgacaccttaaaataatttttggaaggtataatattgattatttgtatataaggtaattcagaggggatcaaagatgactaaattacatggattaagacttcacaattaactcaagccaatgtatcacatgctgtatcagactgtatattatgactaagtcctgggttactaaggccagtactcaaaatcttcactagtcaacacagtagaacctccaactgtgatgagcagcacagcccaggaacccagccataaccaaccaactctattggtcttaattttattgatgatattaacttacattaatttacagccattaattaacttccctaattccctaatcgtgtgggcagatgcacactaataacactttcataatattgtgtgatattttgtgtaatacagtgtagtcttgtttgtaataaatggccagtgattattaaataatactacttggtattaaaatattaccttacttttttttaaccctcagaataagaaatgtataagggacctatataaaatgaactattaacaattttcaatatattatttgatattaacacagcataacatgtgttatctatggtgtacctaagaaggagaaaatgtcaacatgaaatttttcagctattaataggatgacttgttcatcttgatgtttaactttatagtaatttaatggtagattaagcattatcatttgggatatgatatcctaactttaaaataatttatgaacacttatcttaaaaatatttgtagtcataatcctcattttttaaaattttaattagttgccctttctaatcctaaatgaaatttactctaaaataacatattaacactgttcttttcaagcagattgggcatttttcttcttgcttttaatgtaatgtgcaaacttctcccttaaatggctggcattagttttctgactgcctggtgacaagtgaagactcctttcttagaaacagcttttgatgagcagagaccatgacccttacagaggtgctcagcacatgtgctagtgctactcggatggatgtggccctcctttgagttctgtacaggatctcatttcctatttatttttatctatctatctacctatctatctatctatctatctatctatctatctatctatctatctatctatctattcactcatttatggtgtggtattcaatcagtatttgtttatattgttacatacagagtaagagtagacaattactcactaccaacattaccttcaagacctaagcatcatttaaaagtgcagcagttcccaatattcagtcactatttgattttaaattctggatgaaagcttactcaatgaaggcattattgttcaaaggagtcactaaaactgcattaaattgaaacataaatttattggcaagcgatgagagagagatgaatacaataattcacagaagagagaaataacatatactttgttcaaaacccttttccatgtctaggtgaaggagaaggaacagctggtattattctaactttagctatgaatatcatgagtactttgcagtgggctgtgaactcaagcattgatacagatagcttggtaagttactatttttaattttatgaaaagttgagagaacaaaacaaaaagagtaggcactaacatatgaaatatatatatatatatatattactcagtttaagaaataaaatattcaggttactttaaggacattctgtattccacattaagctgtggcatgatttatctttcgtcctcatggattatcattattatgtgtctttgccctggagttttccaaagcaaatcttagaagtggaagacattgctgaggttagaatctccccaaacttggcttcactaacgccaaattactccagtctgttgtgccactatatacttccagcaagagagcatgtgaatgtttccagcagtatttcttattcaggcttttacaattttgccagcttgatgaatgtgaagtaactactaaaatttctggataacttagtaagtctctattgttgaccacttggatttttattgttgtttatttctgttaaatgcttgtttctgttatttgcaacctgatgaggtttgatgtgcttgtttgtttttccttatgttataggtgttcttaagtcctggatcagtcatcagttctatacatttcaatggcccttgagccagtggctttactcacagtataccttaatgaatggaaacattgaatttgatagagagtagtttattttcctttacctttatggcttgtgcatttggtgtcttgtttatgaaatccttctgtatattaggtttccacattcaacagcctgacatttttcataatcctcttgtcttattttgaaaatgtctggtcatagtgtttgtcattgctctgttcctttgtgcttaacggatgctgtcttgcatttgaggactttgtgtgttcaaagaccatatttggtgtattcttccatagagtgagagcctgaagtgatatttgtgtgctaaaatgatacaaaggactactaattcacaagggccagggcaagaaatgaaaagaggttccataaacttccctatttatattttaataaaagccatattatcagttagactttagaattggcctgagaatgtcataactgatttctttttacatatttgattacagttatttgtgtcagtaaggaatgtccataccacagcatgagtgtggagggttcaaagggaaactggtggggctcacctccctcttttcaccatgtgggtcctaggggctgaactcaagtcatcgggcttagcagcagttgccatcacatgctgatctgtcattgcggacctgtcactgaagcttaaggctttggacatacattcatccattccttatgtcatttctaagaggtctagaatccatacaactccctttacttccattttcagacacccattcatgtgattgcaaaatttctatagttataatatataaatacatacagtatatttttttcataaatatgtcacaagggaaaaacctaaaatcttttaaagcctcttcttgtttgttcattttcatcattccatgaggcagcttagtaattccttgaaatacagttttcttaggttttatttagttagaccagtccctagtctcttctccacacttcttggttttgtgttggaattagctgaagaagattatataaatgctgtttctatttacttaaatttttaaaactatgacttcataattcaaaacccttgtgcacattatatatttctttacataaaaattctcttcttgtacatgtacaattccctttgcaaccttaattttctggcttaatcacatagccaaacttttgacattgcaacacaatgttgtcacctacagagttcacactcaagatatgtacagttaagctcctaaacttagtcacacacattcaacctaagattttcagtaagtagtaagtttttgatttgtgttgggcttctttcatagctctgtttgtgcagctggatgtggcctgtgaactgtggattggacagtcctgttagaatagcctttgcacaggctgacaaaaccgttgctaaatacatttctacttcatgtatctagtgtccatgaaagacacttaaagtatttctccaggttttcccatggctatgctagactttgttgtctgacattgtatctttcatggtgtgtgaaaggaccctttacagacctattgtgtttgtgacatggtctatgaaatgtatcaatatttgcagttgattacgttttcaaaagtaatgctcttttgtttaatatcaaagagcgtatgttagtttgcatctctttgccaagcaatgctggcgggccttcctgggtgttggtggtcccttcctgctattacctcccatcgtgctggtctcacctgcactgctgcgaaaactacccggtagtgctcttctttccacctcttgcttgggaatctgaagggagaatgtctgatcagtggccagtagtgctcttctttccacctcttccttgggaatctgaagggagaatgtctggtcagtgctttcagatttcacacccacctgatgtaaccccaaggttttacaacactaagcaaaaactcagtgtgatgtaattttatcttactgtgctttaaactgcatcaagagtgatctgagtttaaaatggaacaaatacaatgttttctttactatattataaagctaagtacaaggctattcaggaaaaacttcagagttggaataattacttcatttcccatctgtcccaatttaaaaattaatacagtcaatttgactatgaagttatgaatatagcagtataactttgtttttattttctacctgttacatacccacatatctctagctttctttatctctcagctattaaatccaatatcacaacaacacaagttatgttgtgtttattatcacatatctggaatgctgatactcagaactatccagcaaccttttcattatgttttcataataaaatttactcccaagctctttcctttatttctacatccttttagacattataataattctattctttaaactcttagccaaagacctttctatatatctcacagaaatacatacatataaccagaaataattcccttacatctctctactatctctttctcttttgtctttttaaaatttttttaattaattttttacactccatattccattccccacccccccatccactctcccactgctccacatcacacacttcctccccactcccccatcccccactcctccacccccacctgatctctaaactccctggggcctccagtctcttaagggttaggtgcatcatctctgaatgaacacagatctggaagtcctctgctgtatgtgtgttgggtgcctcatatcagctggtgtatgctgcctgtttggtggtccagtgtttgagagatctcaaggttaattgagactgctgctcctcctacaggatcacccttctcagcttctttcagccttccctaattcaacaacaggggtcagctgcttccattggttgaatgcaaatatctgcatctctttcagctgcttgttgggtctttcagagggcagtcatgatagatccctttttgtgagcactccatggcctcagtaatagtgtcaggaatgccttttgagctggatcccactttgggcctgttgctggaccttcttttcctcaggtttcctctccattccaatccctgcaattctttcagacaggaacaattatgggtcagagatgtgactgtgggatgacaaccccatccctcacttgatgtcctgtcttactgctggagctgagggccagcaggaagagtggaaacagggcaacctcaggaaataggaggttggggggggggggacgacgaccctccagaatgcaccagaggcctgggaggtaagagactctcaggaatcaaagggagggaccttagatgaaatgcccaacagtagggagagggaacttatagagctctttcttaatgtagcatactactagaaaatcttgcagtagacatgacatcttagagtatgagtacaggtttattgaatctctagtcatatgtactctctttacccatgtccttgcttctatctagaggcaagtcctgtgtagttgcctgccctttatgagacttttcaccagtgaatactttcatttggtctccagtttctgccctaattatttgacctgtttacagcaaaacttctaaagagattgcctttctctgttatatcttctgttctttacacagtttcttccatattcatcacccatgtgagtcacaataaacatcatgtacaaagcaatgtccttgtcttctgaagttgttgagcactatttcacatggatgaatccttatactatttcatttttctgctacctcctgggccttcatctcatgtatcctttaaatcatcatttgtattacttcttctttccacatgcattctctatagctattggtatctaaccccatggttcaaaagttgtctcttgatgaattatagattcatatatttagtgtacatctctctattcctctctatacatgtccagctaccatcttgatacctccatgaatctataaaatattctgctagattgttttctagtagatttgacatgcaagcatatgagttcctgtacatcacctcagagtgcacatatgatcttaagtggccatcgaaatgatacaaagtttatactccctgaaaggccaaataaataaatgagagccaacaaaggtataaaaggtgatattttaaacttggcagtattaaaccatctggtgtctaagaggttgctcacacataatttcttcatttgataactcatatccttccagaactttctaccacagaaggaacagaaagtgagcagtcttaatatgtgaatgccattgccttcgtttttcaagaagaccagcaaataagcatccctgtttccactagattattgaactgaactgtatgtccctagtaaaaagaaggaagttgcaaagttaagaacaatgagcttataagacttccatttagatcactattagtgaagttccagaaagttcttgcatggttggtgcaatctgagaagagttttctgtcagcacaaagtcactctgtgtctcctttgtgctctcatcacctgtgtttattttgggttccactgaggatcaggtgactaattgtagaatgagcaacatgaaatgtgggaggacaaaaaagaatttctccttccttcatgactgccgtcaccaaatgtccttgtattgaaagcagttcctgttgtaccaatctgacggatgagttaattcatcctctttgtcttttgcctccttttaatggtagcttgattgtggtttgttgttgttcttacaagtctttgtggtgtatttttcaagacattatgcattcaaccgcaaagagccttgcatttctttctggctcagacactaaaaagttgagtgcctttagacaagtcatttttcctcatttccaaggccttattttcctcctctgtaaaattaaatggtttggttaggaatttttcagattgctggcatgtttgacattctctctctgctgaacccttccatataaaaatataaactcttaacctacatgtagatattatttcagttcttaggaaatccacacaccaaccctatcctgaatgctgacattcattgaatactagcctgtagttactacagctgactcagtatgttactacagccaacaaagaaaaagtaactaatagaatgatatttttgaaccttgaattaagacaagaaatttaacagccccctcaggaattgctggagtgtacaaaattgtgtgataaacttggaaaattgactagggctttggtcctgccactttatcttcctggtttaggttttgtcctatgtacaatgaaaggatggattagatcatgggctctctcagtctggctacagatgaataaagctgctttttcaggttcacagaggccagggaaattagttcttctgctggggcaagtatcagggcctgttttctgtattttgaaatgtgcccaggtgattctaatgtgtatggaggcctttaaatcactggattaagtggtcctgcagattcctttttgctttgaatgtctgtgagtcacgttacaaggattagcaaattttttctattaaggttgaaatgaaaatagtttcagctttgtaagcttatgggctcatgacagcaactcaactcaacctttgtatgacaaagcagccatagacgttcatgagtggtgtgtgtgtttcatttcactttggcaattattattttcagtttatttgaattttgagtggtttgggtttgagagatagggagaaaatatgaaattgagaggatagagagatagtaagtagaatctggaagaaactgggggaagaggaaagaatatagtcaaaatacgtaaaaaaaatataaatgaacctaaaataacaaatcaaaatatcctatcaagaattcagtattttcctctaagcatctatattttgaaatattctaacttctccaaagcattctgtcagtcagcttcattttctgtatgtaacatgaatacttaggtaagcatcattgacagcacaaaacatggtttgctagtggtccttccatttactagtaactataccctgtaggctaagcatgagtagaaatatggccactatgtcatattcctccactccatctgcttatatattgtattcaccaactaatgctatgcaagaggcctggtttggtctgtggtacatacaccagtgacactccattgaaaggattgatttttctctttcccagcaaatatcaattgcaaatagtttattagttaagggtgagacatgtccaattcccctttcccttctcagccctgagagttttgtctgctttgaacatgtggcaaccttgtgaatgctatcactgtctctgtgagttcacttgtgtacaatcctgttgtatctggatgacactatttccttgaaatcatctaccaccacttgctatctccccttcctataaatctctcagttttgagaggagtggttctctcattctctgcacattgtccagtcatggattgttttgttcattagtttctgctgtaaggaaaggcttctctgatggtggctgagtgaggcactaatctatgggtacaacattaggtcattaagagacatgttcctgttatattctttaggctgaataatagaagtaggctttcccctacagcccatgacctacctaataaggtttttgcccactttagatgtgtcaagtatcctatctcatggaataggtcttaactccaattatctaattgttggttagtctataatacttgtgcctctattgcacttctattatagtttctggatttgtagctagatgatattaatgatttgtaattactttatgtgtgtggggggtttgcctgcatctgatcaccatatgtatatctgatgtccatggaggacaggagacagtgttagatcctctggaactggagttatagacagttgttagctactttatgaatgttgagaaccaaaaccaagtcccctagaagaatagcctgtgctcttaaccactgaactatctctcaatcctcccccataatgacatttttgtctgggattgatgaacattttgggcatgggaaacaatgtcactattgccatgactttggagtgcttggtcattcattgaagcataattttgttattctgccttctaaagaactaagtaaaattagcaaatatttttatgagacatttctggattcctgaaaatgctgtaatgacttctgtgattagctagaaaagatgaacaggaaaatttagagtcgttttcatgataaccgagttgcctcctttataaattaacattgaaaggaagctattgaactacattttgttcttgccatcatcattgtcatcttggtgcttagattagtacatttaggcattactgtaaggataataacagttttaaggattacctcttcctcaatatatttaggggaaggctttggctcttaatacaattaatgtaccagaaattacaagcacacgaatcgcaagcaaacatttcactttatcttggctacattccaatttgaaagaataagaacctatgctatgttaagttttcttgtccataaataaaaaacagattcagtgttttagcacctggctcacctggctctccttttgtcctttgcctttaaagtatgagaacatggtgttaattccttacctgacttcattgtaatttaactctagccacacagagatttttcctatccatggggctgactaaccttcctgggtagggctgcccatactccttccttcctaaatcttctaagcacagcagacagcagcttgagactggggagtatgtcagtctacagctataatgataattaccaatgctgagtgactgtctagcgctaagacaccaaggtttttacataccatgtggaaatatatagtagacaatcctttaagaaaggattaagtgagttttgcaagttttatgaaaacagataggggtaatctctgcaggggtaatctctgctgtagtatgtggaagaataacctgtcatatgtgctttcctgatggagagatgcttccaaggtgccgcccaccctttgagggtctccagggttgtgatgggcagctcctatgatgaacacactatgctcaaggctgacccggtggtgtttcttaacactctcacctgctttaaggatcaattaaagtggcagagaaagttcattgaggaaatttgagaactctgtgccatttgcagcaagaaaaacaatttgaagcaagaagtttaaggtccacagctcagagcaacccaactccaggtctctgagccccacccccacccccagcgctagcaggaagtggaatttgatgtgcagccagcctatgatgtccttatgaaatgagaaactacaagaactttgactccaatagctacaacaaaatctatacccaactcatccatgagtgcatcacgctaaagaagaaggatgaattcttgatctgcttcacagacatccatcaaaacttcctgaggtatcgtgcacccaggctatggactctcctctgtctggtcaagcactggtatcaactgtgtaaggagaagctgagggagccactgtccccacagtatcccctggagctgctcacagtctatgcctgggaatgcaggctccaagacagctctggactacatacagcccagtgcttctgaactgtcttagaactgatcactaactatccatgtctttgaatctactggacatggtgttatgattttaaacatgagatctctgactacttgcgcagagagatccaaaacgacaggcctctgatcctggatccagcagactcaacaaggaatgtggctgggtcagacttacaggcctggcaccttctggcaagaaaggctctgatctggatgcgttcgagactttctttatgaactgtgatgtgtcctttgtgaatggctgggaagtgccaccagagagaaaagaatgtgtcttccagtgagtactgcagtacttgcccaggaggctccagagtcagggcatgcactcactcctctgctgcaagaccttgatctagagaggacaggaaggtgctcaaggcttcagtgaggggcatccagcctgtgatcagactccaggcttctgattcctgcctgcccatggacagccttcctcacagcctgattcatctgccttgtcctccaacagtgttctctgggagtaagactctgaaggaaagagaagaactcaagcttgacttccatctatctacccattgggaggttctacctcccccaaaatttctgatcatcagcaataaacnnnnnnnnnnnnnnnnnnnnnnnnnnnnnnnnnnnnnnnnnnnnnnnnnnnnnnnnnnnnnnnnnnnnnnnnnnnnnnnnnnnnnnnnnnnnnnnnnnnnnnnnnnnnnnnnnnnnnnnnnnnnnnnnnnnngggaaggatgggctccttattttctgacttgatattacctctatagttaatttggtatgtacaatttgaattctatttttgtaagaaggacctaccaaattgcttgagctttccacaaagctgagatccgtttttatagaggatatgaaattttgacagggaaatcaagcgtacaatgaataggacttcaactttcctgtagttagttttttattattgttgcttttgctgtacggagggaagaactctggctaattgagaccctcttagttttgtagtggagctgagctctttcgcaggctcctttgtgagttctctttccatgactcaccgaagttcctgtcttgtctacaagaatcatctgggagacttggtcttgttctgtcttctctttttgcagaaccttcttggtttcttccatgcttcttaggatacaggacaggacaccttcttgcaccttgcccatattcatgcttcatatcgtgagtcgaggagggtgactgttctcggacatcctaagttaatcaatgacaaaatttttttctaaaactcctaagtcttcagtgttccagacagtggattttcatttttataagcaacagtcttgctttcttgcccaagctgacatctgagcctgaactcaaatgaccacttcttagaagacatgaatacctacagttgtatgtctctttgggacttggcctttgaagcataaaagtcattgttcatatgactacaaaatgctgaactgttactatgtcttgacttttaaaagactgtttgtgagacttgaaagaatgctgtggttcgggggtgactcctccttctagaggcaatcaacatgctgacagccccctggttcaagaaattggttagtgactagtctattccataatggcatttcagtagttgctactttatctgactgtcagaaaacgtcctcagatattgaattgaactacactttgctcatattgttataacgagtgttggttagggatattttcaccagggtgagaatagttagacttgaggttcattttaagcattgatattgtaagaaacaacttataaacttttatttttaacactcaataagtatgtgctgtctagcacatagaatgttaaatgttctggatttgtctttaatggtgactatcactgatcaagttaggctacagtgcttcagtcaaagaaatgtgtattacttttcaaatgaccaaaatcccccatctctctctctctctctctacatatacatatatatgtatatatatatatatatatatatatactccatcatatattcatttactaattgttcaaatagataatatctgttgtcatcatattttaaaattatcacaacaaagttaatcagattattaaaatcagagtattaaaataaaattaaagcagcattcttttgttgttgaaaatttgccaagttcctgtatttctgtgtgcactaaatatgtactttattaaatgtcatattggaatatttataaaccagattgttgcattaactttttccaaggaaaggtgaacaaatgtattttcactcccaaccagacactgaagaagggcaaaagtaagaatttcatccaagtctaacttggtgaacaatgagtttattgagagtacaataagcatggatgacggatcacttacagactgtgagcgaacataaaacactttcacactacaatgttcaactctagcatggatgatgaccttgtggaagctgctccaacgtgccctacttcctctcttagggtctcccaagatcacttcagctgaaagggaagagaaacagaaggggactgatggttggagtcccagaggagggtcccgaactctactctcctcccttctagtatggagcatcactatagacctagctgtcagtgaatattatcctgtctattttgccacatggctaccaggcccaagcatatctccactctaagatgaggaaagaacaagccactcttccacaattccatggaattgagaatataacctttatataaagtcaccttttgctaatgatgcaaattgatttcaaagtaatatttattagaagtgtaaactttttcactttctatctgtgcaataacttaaacattgtggattcactaaaaattgatatatgccttcagttccagtactcagaaggtagagacagacagatctctatacattcaagggcagcctggtctacagaatgagttccagaaaagctagagctacacacacacaaaagaaaaaccctgttttgaaaaaacacccccccccccaacgaaaaagaaggagaaaaaaagaaattgactaagcatcaggtgtctacaaataacttagttgacatacaggattatagatgttaaagaaagtggagaggcagtactgtctgcagtgctacaatcttacaacataatatgtagtactgtcatagtggggaaaagagttctctttgacatcatctatgcccttgagaatactttggttatttgtgtgtggactgcgtaactgagatttaagcaatcacaaaaataaacaggtctctacagaacccaattatatgtgtcttagttgtttcgctggctaaacatttaattatatctaattatttcctgttacttcactgaaaaccctgtcaaataacctagtgacagttttcttgcatcataatttaaaggttatctttttaggcaacgtcaaactaattatggccactgtctagagttttcaaacaaacaaacatactgttattttcatttcagatgcgatctgtgagcagagtgtttaagtttattgatatacaaacagaagaaagtatgtacacacagataattaaagaactacctagagaaggatcatctgacgttttagtcattaagaatgagcatgtgaagaaaagtgatatctggccctctggaggcgaaatggttgtcaaagaccttactgtgaaatacatggatgatggaaatgccgtattagagaacatttctttttcaataagtcctggacagagggtgagatttcagcattacttgctttgttagtgggtcccaactaccagagcaatatgttcgtaaaaaccatttgtaacataattatataatcagtatcccttatacatagttgaaggtgtgactgtgcaaagtttttatgtttcatatgaaatttgaattacagactctacacaacaggttattgtaaatgtgattgtatttgaatgtgactatacttgcaaatatgtaagattttccaactgcagatgcctttaaatacacacagacaccaaaaatacaaccatcactatgaacagtagcaccaaattggttgattggcacagtataaattaatccatcccttaattaacttagatgaaactttaaacttgagtgattttcttgcaggcaatgggtagttatatcttagttctttgggccactctgtcagtccatgtttctcaagtggtgcatttagaccatgagcatctagagtggtaggcacacattcaggcattataacttgttctgctttttgttccttgcttttgctctttatccctatttttaccttgaatccttttctttctgttgctgttccttagtatttatgattccaagactttctcatttcctaacatagcgattctacttttgtggtttttatgagtttctctagaggtcacaatatatattcacaatgaatccaggtccattttaaaagaataatgttatcacataagaggcatcagcaccctgtagtcccaattgctctctcatgtgtgtcatattcttcctatgggtcattttgtgtattcacagataatatgtgcaaatagatgttattaaaatgactttaagtaagcttccctgttagatccagtaagagtaagaaaagcattttagtttctaaaatgcttcctttattcatttagcttcaagtttgcaactccttgtagatctgagttgtgtcttttctctgagtaagttctcttaacatatctttcaagataagcccattgacagcacatagcttctgtgttggtttgataatttcttactttgccataagttttaaaagataactgcacaaggttcacgatcctagtttggcagagttttgcttttcctcttcttttctactcgtttcctgactttgtggtgtccataaagttataagtcattcttatctcaaattgttttgttttgtttttttgagacagggtttctctgtgtagccctggctatcctggaactcactctgtagatcgggctggcctcaaactcagaaatccgcctgcctgtgcctcccaaatgctgggattaaaggtgtgtgccactttaggggaaattttcctgaacataatgccataacttatgctctgagatcaggaatcaacaaattggaccttataaaattgcaaagattctgtaaagcaagggacactgtcaataggacaaaatggcaaccaacatatttggaaaagatctttatcaatcctacatgatagaaggctaatagtcaatatatataaagaactcaggaaattagactttagataatcaaatagctgatttaaaatggtgtaaagagcttaaaaaaaaaagaaagaaagaaaggtgtgtgccacgactgcctggccctcaatatttaataaataatatattttttactgggctttcttcaagaggatttctttaaaaaattttttgtacttttaagatgatatgctgtggtatgggtttttagctttaagcaacattctggttatttttctctgtgtatggattgagtatatgacactaatttttgagggaaccctcttagtaactattatttgaaatatccccctctatctttctcagcatccttttcttctctttttctttcttcttcatttctgtcttctttctctttctggtatctacattatatacaagttacacctttcctaattgtgccatgattcttggatatgctgggggagggggttgtttgttgtgcagaggcatgttggtgttggctgcttttagtaacatatcctcaagctcagggttctttcctcacacatgtctaaactattgttgaactcctcaaggcatcctccatctttgttgtacatggtttttgtttgtttgcttacctgcttgatttttttttttttgctatacttgtagaagtcttttgattttgctttagaatgacgcctttctgtttactaaggatccatctgttactatatgccaattttttcatgatgaaatccttatcacattagtcatagttgttttgcattcccaacgtatgaattagagtgtcattgtcacatctggctttgttctatcctagtattgcttattatttcctcttttccctttcaacatgtctcattgttttttcttgagagggaacatagatgacgtgcttgggaaagggaccgtgataataggctgttagtaatagactggctatgctgtgttggactgtagagttctgtagctgcatagttatgttagagaaattacattttcggctgtgagcttttaaatggcaccagcttagttactttaggtagtacagactggttagagtgagttagcactaaatattactgtttcctaaagtcagttagtctgggcttttggaaaaaaaatctctaagttacaaatgataaaatagtctcactcaagatgggccttaaatgggagaccgtgctctggcctaacagaatgatcactgtcttgtggggtccttgaaagctagggaaacttcctctagtcttcctgtgaggtcactggaggctgacaggaattgtttccctctccatggtccacaatgagcccaggtcatcttctcagtgtagtgcttgtacttgctccctccagctgtctgcttgctggtttctgctggtctctgtgactgtatctgcttgcctttctctctggctctaggggcagagtcattcgttctatggttttacctttctgacagaaaatgtgttgcttacctttttacttaagatggagtgacttttcagttagtggtagcacatacctttaatcccagcacttgagattcctgtgaattcaaggccagcctggttcacagagtaagttccagaacaaccaaggctacacaaaagaccctgtctttaaaaaacaaaaacaaacaacaacacaacccaaaaagaatagcaatgttctctacaaatgaagacatctaaataggtgctggatttgttaaaagtgcaccccattctgcctttatagaatctggcgtgaggctgctgactcatttaacaatctgagtggcccatgtgtcttattaacaataaacagatgtgtcgacatatgagaggctcagttataatcacccatgaatctgatgtttcatttgattgtctgtcttggtttctggggaccacaaggaaacaagataattatagtgcacttccctctgccattaaagtgcagagaaggtgctttaaagggactgtgccccaactgcgctactcttgacacaatggaattcctgctcctacctagtttggcactgaatagctctccagattgtagtctgatttatgttgatctaaattttgcagagctgaggtgcattgaggttaataaaaacgttgactcatacttaggacacatctttaaagcttgtttgcaggaagtactcttagaaataagaagataattagtatgtgacaattactcaaccagacaaccttgttagggtacaaatcaattaagttccttgctgttgaaaaactggtcagacttaatacatgccagcactttgatgtgaggaaactagagcaatagacaaagggtttcaagctaaagaaagtatttattcattgcctctcaggccagtattatgccagcataagaactgagttttctgaaaatgtatttccttctggaggaaatgcagtgaactcatttacccctactaggtccattcaaggtcctttctgccaactatcctgtaatgaacttagcactcttccatcggtccactgtcactttcttttttcctcctgtacatcacctgcactgaccgattctgatttcttatttaacttatttaacattgcagtattggaaaaatcctaacatggtgaatgtgtatttgtatggcatggtctagcacagagatgggagcatgcagtgtgaaattcctccagattttaaaattaatgctttatctagtcattgaacaaaattattgtattatttatttataaggtacaataatatgtatgctcattcatttgctctcctatctgactgtctttcagtccacctcaatatttcttgagtacctttttaaagccaagtacacatgggtccttttattcctccattcttccagccatctcactttcccatcctttcaccctccaatctgactatcagctaatccaagtatttattatttaagtacaccattattccagatggagaaactgaaaaaacaatcaaaacggataaactatgcaacctttgttgaatttatattctttatgtaaatacaaagctacaagaaggagaaaataaatcattacaaaattcttcttcataacatttgtttattttcccaacaacaatgatttatataaattaccttgtagagctcttttgagggttaggaaggcaattattcttgtcactgtcctttaccagcttatcacaaaggcctacattattgccaagtaatttactcagtaaattattattatttccattggttgtggcccatgccaccattggagtttataagttattactagtctacaatgaaataagtatagagtctgtaaatatttagaaattcattttttaatttatttaaagtactgatttgcagttcattaaaaacagatggtttttcaccaaccacatatatgtaaagaacacttttcaaaaagaccattttctccttaaagaggtcaaacaataggaaataaaggggcagtgtgaacagcatgaaacaaatttaagtgttgcatatatactgcagcttattctgtgatcagttagtcattgcaaggaactgagcttatatcataacaaagaatgtgagctttgagggctacctggacaactgatctctgtaatgggaagtagccttaatctgatgctgtgctcttgcagctgtggtctttgcataatgagaacagtttaatatcctttttgcttcttagagtttccttcttgccagaagagtcatatgttagttagcatttgattcaaacattgctgagaagctgagtgatcttggctctcgactcaacctgaattctgtgagaatgtatactttactgaacatgcctgtatcttatcatcaggcctgaacttgacactgctcattccttaagggcagaatccatctgcctcttcaatgccggggcccaatccctggaccttgtacatgctagacaactgtacatgctccaccaatgaggaaataagtttagtccagggacagtaagtagtgttaggcctattttgagtaaacttcaagtttgtatccatattcaaaagtacatcgggcagcaggtccctgcttctggtttgagctgacgtgcatcaagatagactgtttttactcttccttgactttaaatggacactttctccctttttctcattagtaaaagtcagtggtcaatgaagcccacatcaggaatacagttctgtatggccagtttctgatttcagttgcagattatgatgagttccagatcagttccagatagtgatgagaattcggagtgtgtaaacaggcttacgtggctccatgagaagagaacccattccactgctttctgtccaaggagcagtgctgattggataataggtgctatccttggtgcaagagtaatgccatcactttctccttctaggtggggctcttaggaagaactggatcaggaaaaagtactttgctttcagcatttttacgaatgttgaacattaaaggtgatatagagattgatggtgtctcatggaattcagtgaccttacaagaatggaggaaagctttcggagtgataacacaggtgagcacaaaaatgtaaaaagcaatacgaattaacatttttatcattatttgacatacttaagaaattcatatcactctgcaaaatatatttggtgggtcctaccatctcgtctactgtgcaagagaactgtagcatatggaatgagagtacctcccaatgtctggaattctgcgtggtgtatatttcttaaagtgttttgatagtgttctcccaaagcacaatctgtaacagcagcctgggtagttccttgtgcaggcttcctagtcttgcttaagtacttgatctccgagggagtgatagcagcctgtagataaatgctttgcaagatgtggaagatgcttctgagatcataagctctcggaagcaggacatagtggaattgaaagttgaagtgcagtgatgttttccctttggagtctgagtaggaagaagtatgtcaggtcaatctagattcttataaagggcagtgtttgattcaggcagtacagcatctcgaacatcgccatttagtgctattctgtctgtgttactgcacatgctgatttcttgtgtagaggagaaacggcaatggttgcgggcaacatgacccaaatgtgaaccaagagatgctgaagccagaagaattgcagtatttctgctgctgttggcccttttctctgagacttttcctccttttgtgctactagacactaaatccaacccactaagatggctctttgaagcacttctgtatttttaacacaaaattaacattccgggactatcaccaggtagaccaactacaaagctagaccaagaaaatgcttgtacttcttgataaatgatcttcacagaacatttgctcctttcaagtggtgagacaatagatactgtaaccaccaaactgatgctttcaatttgtttctatggtgtgccatttttttcaaatgcttcatcttggctgaagttgtggaaacactgtgtgttcaaaaacacaaaagggattgtcagatggcctaaagaaaaagaaacgctaggagtacaaggttcctgaggtgagagcactagtcgagtaaaaatgctaaggccagtggaagggtgtggttgtctgagaagcactgctgttggacttgcccaggtcctgtgctgccagttgaactaaagcagggtaggctttgccttggttgctcttgttcgaacacattggcctacaagaagcgtcaacctctaaaacttctatcctcttgctcatcatcgtagctgctacacaatagaagggctccgtcttcctcactagctctgcttaggagcttacttatgccaggcacagagtacactgcagtgggccagagctggaaaatctcccctgcctttctgcctaaatgactcttcagacttgactcaattcatgtctgctcttttatggattcaaggcttacatttaaaaaaaaaaaaaagaaaaaaggaaaaaaaaaagtgtgttcagggcatccttcagaaatactgaagggtctctggaacatcagccagcatggttaacatgtctcagtgacaatttttgaatgtcatgtgaaacctaaggaaggaaggagagagagagagagagagagagagagagagagagagagagagagagagagagagagagcaaaccaagtccttatatgcttgatgtctaaactacgggttactttgcttttcctatcttttcttggaacgtgaggattgcagcatgcttctcctttccttagaaagataaaagaaggagaaaagtgaatatccacagaaaactaactagtttggtctgctttttcatcttttcttttctcctctgtctcctttaacaaggatgtacttcagaaggtcccacactgagctagtgtaatgttaaaggttcactggccactggttctcagatacatgaaacaggtattttgaaaagtaccctcttatacagagatccaaaagcatttgctgggcagtcacaaaaggtcctgttggtttggacggttcttaacaattttttccctccttttatagtttagtaactacatagcaatctcagaatacgtgcagcccagaattcagactatcatgtgcattccaaaacagagcctctttcatttgttctgagtcaagcagagcaggcagtgaagccgatagatggcatctgatttactttggcaattagagcaccaagaagaaagcacccactaatgctgcgcctggctaggcagataattaataaaaagcaactattttaaagcttcagttacaattttggaaggctgtaagttcttctgagtaaaggactagaagtttttccttttgttgattactattgtatgtggtatgtgtctgagaggaggggagaatgggtggggtattcatcacgtcatggctcacttggagaggtcagcacacaactttcaggaacaagttctccccttccagcatggcatttagacactggattcaggtcatcagggctgtgtggcaagcgtgagttatccactgagccatctcactggctccttttcttaatgaattgaaaatactcaccatccacccatcattctcaccacagacagaggtgaggcatcttttgttttgaaagagatcagacagcatgtatagatataaacagtgaaattggtggtgacagcttaaaattcactatataaaataattacatcttgtgcttacaattataatatcacagtcattttatttatatcaaatgtagagatactacttgccattaatatgccagagaagttccagtccaacctgtaaacttctaatgagaaactcaaaacgatgttcatagtcgtgtgacagaaattaaaaacagaaacagtaaagccaaagtgagtggctgagagttagtaatgaaaccatagctgcctgtaagctgtgggctaacaagggagtatataggcagagagaactgtccagattaagctagctgtcactcctgccagtacatctgtgtctttcctgtcctgctgttttgtctcccttcttttcttgttttctctctgattgcagaaaacatgtaactgtttactggttagacattatgaattgaggggttttctttctttgtttgttttgggggtatttttttaacacaaatactttgcttgactgcccaaacccagatgggatctcaaaccttgcttatgtatttctgcgtgtagttctaatatgtctcattttcaaattatccacatatctcccttaattatgcaagatttaaacagagtgaccagaaaatggaagcagagttataaaaagaaggatagaaatacatagtaaaatacttttcttctgagttttctccgttgtaagacatctaacataacaccttggatgagaagaattcaaaagacagtgttctatgctgaatcattaaatgttgctgtctctcacatgtgtggttctttcagcatttggaccctaatctgtataatcttaggacagctatataatttctctgtcatagtttccttgtttgtaaaatgagtatagtaataataacaattatttgtactttgggggaaattgaacgagaaatacttaaacttttacttcccacatggcttgataattatcctctgttatggtagttattatttttaattcagtgggggtggggagtcatgtctcctctgtctttctactggactgggggtatgttctatgaataagtatgaataagtatgaataaatgagcttgcacaatttcacaaagaaagttgtaatgaatacatgccatagagtgtcataaagtttataggtttagaatgattgggtacatggagttctaggcaggaagactgtgaacaatcaaaaggataggtcagtgtgaagggaaagggagaagggtcagagggaaccacagcttagagggtattagacgtcatggcatggtccagtaggaaggggctaattctcctgggctgaggaagggaatggagaacgtttggtggcacattgctatatacatgatgaactagcaaatgattatactgtgatgtggttaattagaacttactgaggtagacagttggacagagtgtagaattcaagggagggcagaaaaataactgtcatgtccaattttcaaattagtataacacaatttagctatttcagagactaaactttgaaacctttgattatatgctttggttagaaaacatttttatgtatctttggaaatgtttatactaaaactttgtagtataaaaactgttaggaagctgggcagtggcagcgcatgcctcggcagaggcagtcagatctctgaattcgaggccagcctggtttacagagtgagttctaggacagccagggctgcacatagaaaccttgtctcaaaaaaaaaaaaaaacaacaaagaaaaaacaacctgtaatgaagcactctggatttctagaaaactaaactttaactatcctgtatgcagtcttttatatttaaatcaatagcatatacactggtagtatagcaatctatatttgttacaaactgttaatagttcttagtagaaatatgtcattcataattttatagttgggccacatttcaagggaactattcatgatgtacacatacatacataagcaggggtagtcatttctcctattaatctattttatattaagtgcaatcaccacataagctggattacttttttttcatttgacatctagtactataaagcatattagctgttgcaacgatatatggtcagctgtgggaagtccatgtaggcttagccacttccacagagttgaggagtggaggcagcagctgcagggaggagatgggacatgtggggaacaatgatgatctctttgttctgcttagagtctcaagaactgctcattatagcatacatgacattaaataaatatcaaatatttgcttgccctaactgacttattagtgagtagtttcttttaagggcgacaggggatccctgggatgtgacagcttcaggtgcattttttaattggtgcacagcagatctgagagtgccatgctggccaaatcattccacttctcagggccttcattttgaatatgtaaaccagagagagagggtttaggttgacctccaaagacctttaggttagacagaggagtttgaggatgattaaacagcttaggaaacaagtaagacctctgctggcaccgtgaaggcaagggactgccagattctctttgaattaaaggaatggaatgtctgattgatggtatacaattgaattctagctgaaccggtttctttagttgatttttctttaaaattggatatgttgtccattaccttttaccagacatgaaattatgaaggaaagcctgcaagatttctgagttgtgataaatctaccacacctacagcttctagattcctgacagcttctttccttcataattttgaatgtgtatctgcttaaaataaattagttaaaacatcataaatttagtaaactagtatacattatagattttatgactaaaagttaaataatttctgaagcacccgtaggaatcttcacaggtgtattgggttgttagtgttacacttaaagaactgtgatagctgtgagcatttgggtcacatttagagatctctctctgtctctgtctctctctgtctctctgtctctcacacacacacacacacacacacacggagagggggagggaggagagaaaaagaggaggaggggagggaaggatgagagagagaactttattagccagaaaaatagccttatagaagttaactttcaaatctgaggaaaaacagcatttactctgattgttattattttctacttttacttcttcacgtctgctcactcatttgggacttttgctgagcttattcaaaatttgcatctaaaaaagaaagtaaagacatggccttcgacactcatagatatccacggacttagtaattttctttgatacacactaccgagattgggctccatcttcatatgtaacaaagaataactctgaaactctaatcctcttttttctatttcctgtgtgttggaattaagggcacatactacagtgccaagtttatatgcttctgggataagacccaaggcctcttgcaaattaagtaagcattttttgccaactgagccacatccccaccaactaaacttggtgttatttaaggaatgaaagtataagaaataattggggagcttgtttggtctgaggataaggaacagtgcccctaggaaatgaagcttgatttgaaacctgaaggatatagattgttgtgtgaagatcagggaggataagatttccagctgagaagaaaacttaggtgactaagctaagaaagtgtgtgcttagaatagaatggagtggaaaggagccctgagatcttgggaccatcgtaaggatattgtacccttagtgaaggggaaagtcattgacatttttcatgaattacttgggtatattgtaagagaagcaaaagtataaagaagaagatcaatttaggaagctcctgcagtgacacaaaaaggactagtgatagtttggcatgttcagtgggaacagaaattgagaaagaaattgatttgacatatagtttgaggataatataaatgaccaatgactcatttttaagataagctgaggaataagatgaattatgagtgactctcagttcctgatgtgcactgagatggagatgcagaaaggacaaaagtagggtggcatttctctgctttacaaagcatggggatgaaagagactgggttcctatgagcaactgtctgttttaaagataaaacatcttgtccattcctttcattcttccgggataatgaaattattctgtttgtcccaagtaaatatttctattgtatatttcaactaaatatataactctttcaaagttacagagatgcaaccaaaacaataagaggaaagaaaattattttagacattgacatcaaaaattttttgccagtcttgtatatataaagagtactaaatattatttttaaaatattattacctgagatctcttaagacagtggttttctcttaagcacatggtccacctaagtggaagtgttactgcaagtggagcatcttgacaatggtcatacagtgctatttgcacaccagagcatctgcctcttccctagcacacatgcccctgaacaaacggttgatctatgatcacatgggtttctgagttgtcctttcagcttctctttgttcatagaagtaagaagatgtgtaaagggatgttagtagaagaagagtctcaattcttcccagagcacagtggcctcaatttccttatctcaagggcattgaaataaaaaaaaaatccaaaaagagttttaaatgttgccctatttttctttaaaatgatgtaaagcaaatgtagaaaagtatgactagctaatgggtaccatagatgataggcagttttacacatctaccagtgtgtgtatgtgtgaatacagaaatgcatgtatactcaccttgtagcacagtgctctagtggatgctcatttgttccttttcttacttgaaattggtttgaataaagagaaaaacattaaaagatgtataggttatttatactttctaattatctttaccattgcagaaagtatttatcttttctggaacattcagacaaaacctggatcccaatggaaaatggaaagatgaagaaatatggaaagttgcagatgaggtaaggatgacaaataaagtagttttaaagaagtagatcatacacacaagtgtggttgccatagatgataggcagttttacacatctactggtgtgtgcatgtgtgaacacagaaatgcatgtatactcaccttgtagcacagtgctctcatttactggcacatccttgtcagaacctttgactcatccccctttcaggagtgtcgctcctttccatatactctattcgtggtgctttactaaagttctatagacccttgctcctagacgacgtatgtttctctcactattttgaagactgagaagtccaaggttaaggagccagcagacagtatttactatctgctaaggccctacttgctgtcactcccgaggtgtttttctgcacctcactcagtataagtggtcagtgagcgctgtggagcctcttttcattatagtgttaattccatctatggggtactcagagcccatgacctaatcacttcctaaacattttattttatgtctcagtagcactgccttggacagtcaggtgttaacatgagtttctgaagacatgcggacctagaactccctcctttcctcccctccaagttatgtcttgttcttatgaaaatagattactccacttaaacaaatgccaaagtcttaacacattttggtgtcagtgtacaactggaaatcacaaagtctcaattcagccaccatgagacttgggactttaggtttttcatgttggcattccaccattccctgcactttgcccattgttgttcccttgatgttcgctcttcggcctcccccagaacagatcttgccaggagctttgaagcctctgagtgctaaatgctaaccccttgagtaaccaaccttaaccttctcctaataaaatgaactgagattaaccgtttttcattatcagggtttccttattacccagcaaacacaaggtttttaaagaaaacattaactaaattgctagtgatatactgtaagatccttgatgtacttttacagagtgacctgtcagaatacagtgtgctgggagagagcttgggaaagaaggaattagcctttgtaaagcttaccaggtattgccaagtctccataaaatttgcaggaaactgagatcataaaatcatctaaaatgttaggagataggtttagaagactttagattccagaataatacaggtagttatgtgattagattttgtctaccagtccatctttagatgtacgttttcattggattctctttttaaatttatgttcataaagatgctgctcctgagctaaccgtaatgtcccatggtttgagtaagagtgacaaattttttgctgaagagtccacaaagaaacataaacaccaacccctagcttacagcagcaggcaggagatttaggttaaaggcaggaatcctaggctttaatcctgtatggttgatgatccaatatagtcaaataggaacacgttgaggtgtgtcagcctactaaggcactaggacaaaagtctaaccttcctgccctggttcatggcagcttgctgccctattcagctctggggatctttctttttttttttaatttttttatttaaaacaattttttaaatattttttattacatattttcctcaattacatttccaaagctatcccaaaagtcccccataccctccccccccacttccctacccacccattcccatttttttggccctggcgttcccctgtactggggcatatacagtttgcgtgtccaatgggcctctctttccagtgatggccaactaggccatcttttgatacctatgcagctagagtcaagagcttcggggtactggttagttcataatgttgttccacctatagggttgcagatccctttagctccttgggtactttctctagctcctccattgggagccctgtggtccatccaatagctgactgtgagcatccacttctgtgtttgctaggccccggcatagtctcacaagagacagctacatctgggtcctttcgataaaatcttgctagtgtatgcaatggctttctaaaggctgcatctttagcctacttctcacccctccctgtgctgctgctggacagggttcctgttgtacactgactgcttaaaggacctttatgatttggtctttgctgctctactttcagccccagcccccatgtgtcctgtgagtccactactgtgaattttaattttctttagagcacagtgtgctgctctctgttctatggtacgggttggggcagttgtttctgctttttaccttctggtttctggacctgggaaacccttgcagagcactactcctgctccttctcaccattcaagccttccttcacacatcactttgttctgaactccatcctgaccctcctgctttgggaaaagagactttcctaggtatagctatgcctcggctcctcaaaatttcctacactgaatcaaaattcacctcttggctactccatatctcctatgattatggaatcatgccctgctctctgttgttcctgcagtagttggatccctgggtggtttttgataagtactgactgaatgatctgagcaagtaaagaattcttttaactcatgtaaaatatgttgtgaaaatatcctcatgcttaatgcccaatagacattactaccttcatctcagtaaaggtcttgcaagatggctggcggattctgaaaagaactgcagccctgacttggggccctctgctgttttagccctactaagctatgtgatcttggccccttgactctggctcttagatgtggggactttgtttgtttgtttgtgtttccttattagaataatttttaaatttatcatctttacatcctaatagtcaagggaactgttgtagagacaatttaaatagcagaaacagggaccctgtaagtgggacatttccctgagaagtttgcagaatggaaacacaaggagctgagggtatccatttttacattgcccactagtgcttacaggcaaagcataatccaccttttttactgaaaaaaaaaaactgtcatagaaaacaaaaatcctacaaatacttctgagtagtttggtatagagtactgatttatctaaacatatttgaatacttttaactttgttatttgatggatggtcatagagttaaagatttacagagtacagtatataatttctgagctaaaactagcactaattcattcattcttaagttctaatgcttaaagactcatagtacatattaaatgaatgactgaaaggaagatgaatgaatgaatgaatggattaataaatatatgaatgaatgaatgaatgaatgaatgatgaattgttgaggctgagagtgttcctaactgaaaaacacatatttgctttcaagaaatgtatggtctaacagggaaaaaatacacaattctaatacaggatgcctggctgtcctgtgggtaggcaaggatatttaagagagtaatcagactgagcagaaggacaaaccctgagaatgttaagctgtataaagaattaaaagttgatgctgctggacacagtagtaggtgtgtgtgtgggggcggaggaggtcaggatgtcctgtgggccacatgagaacaattatattttatttttccagtaaaagaacttctgtaggatttaaaacagagaaatgatccaagttcaaacctgcattttagggagagctcttaaatatttctgtgacatgttgacaatttgactcattgatacttgcagtatgatgtttaagaaatgacagaaggccagacgaggatcagtgtgccagaactgacaaaaagaacggtttcagaaaccctgggggaacttctaggctggagagaggcattgaaagccattagcttaaacatacacattgatgccatgtacataaccaaaatctggacacaggaggggaggggacattggtgttgaaacctgatatggatgggacaaagctgtatagtatagtatcccctgtgatacaccaggcagtcttccttgtcttctgtgcctacattccctactatctcaggaaccttttaaacattaacgagtttacacaaagggtagttttaacaagccacatgtttgaacttccataatgagcacataagagtctggcattaacaatgatatgagccacttctgaactcatctccaaaatcatgaatctttcttaaggccttatctaactctgcacatgttagagtgatatgggtatatatcttacctgtacatacaaaattccagattcatgaagcacaagaaacaatcctgtctgtatttatttaactcttatacacctagtggttcttagcaaagaagacacaatgtacatgtattgaataaggaaaaaccaccaagacatctataattatgccttaattttgacagactactttttgatctttttattaaaccccctttaaaattgcagtttaaaaatataagccattaattctaaaataatcttcatattctaccctaacaataagagcctttaaattttagtcgtgttccatttttaactaagtaacttcttactttatgagaaagttatcagtttctcagattttataagtgaaggagataagtattatgatggcatgatttttttaaagcctcctcagctaattttcatgatatttctcatcctgtattacagatagaagatgaacatgtcatgctatgttttctaccctttctgctcttgaatcctttgccatcagttataatggagtgaataactgtgttctctatctgttatctttaaagcccatattgaattgtattgcaattgcatctatccatctatctatatctgtatctgtacctatccatctatataatgtgacaggaataggtataattgtttatcactgctagggaacatgacacttacaaggtgaacactgaatgattttgtaatcaagtgtggggctgaaagaaatcctccagtctgtttagagctaccgatattattgccagattttggttactcaaactaagtaggagttgggagttgagggtgatgtgaaatttattctgtgcaaactcatgtctgcttttagaatgcaagcctcttaagtgattttagttatgccccttctaagcacagtgtttttctttattttctacaggttggactcaagtctgtaatagagcagtttcctggacagctcaactttacccttgtggatgggggttatgtgctaagccatggccataagcaattaatgtgcttggcccgatcagttctcagtaaggccaagatcatactgcttgatgagcccagtgcccatctagaccccatgtaagttccaaaaatctttagataatcatgcaatagaagtagagtccttgaagttacctcatattggtacaaattcccattcagctaccacacctacaagtagggggtacaaaataattttccaggggaaaaatcactatttaacatgagcacaagtacttttttttttttcaacaagagctttgtttttcctcctgactggagtctggaatttataaacccttcaacctcattaacacataataaatacttagttaggtatgcacacacttatggcttccctctgtatcctatttatatcataaatacattaacagcacaaaataaataactgatgctgaatctacataaaatgtagtctcatttttatgaaattttcttctaagcatttgctttattagtgtatgaaattatattaaatacttagaatggcttaaaagctgattgtagctcattctgtatcatcattatcctaaaagtatttttaagtaaagaattaagtccatagaatactatacgtattgtcaaagataaaggcagaaaattcacactctataatgtcttatgtggtattttcttgctttgctagaacataccaagtcattcgacgagttctaaaacaagccttcgctggttgcacagtcatcctctgtgaacacaggatagaagcgatgttggattgccagcgatttttggtaagtcatttacacttgattgatatctcattctccatttatttaaataatcctgcacagctggatttgcacaccctttcttcacacttatgtcacacatttaccacctaccctcagtctctttccctggacttgagctatgaagtggtgaggaaatttagcacacttctctggtatcatatcactaaacgacactgtagataaggtaactatgctttcagatcttttgtggcgaacaagtcacaaaatgtacaattgaaaaaaaaaatgtctgtttcttacagtaactcagcttcccatggggaagataagggtgggccttaccattagtggttcaatgtagtaggagagaagcctgttccatcatccccattactactggaactcagggtagtgtccctgtcagacaccttctcattctccccccgcccccaaaaaaaagtcactgttcctgtttagacatgggaagttccaaggatcatgtaaaatttttactttcccaaggcttttgaatattctggaggtaaatgcttttttactgaagcacttttgatcctattgttattgcccagttacaagtgcctagagagtagatgcatctcttgttctgtggtggtcaagtacagggactaggtaaggggctctactctctgacctcaagcttgcaaacagtttaacatgcactgaaggcgttattctctgtcattcctggccaatttgaaacctttcggcctcaaccccaggtatgaggaagctcaaagttaatggttatatatagctcggtttaagagtgcgtgggtcattgattattttgctttgcaaagctccttcagttcctcaactgttctctgaaggatggcaacagctagtattacattaatttttcaaatccctatcgctactttcccggatgtgaaagctaagagaaaagtacaagctctgaatcctgtgctttctttggacttttgttcttctttgggcctggctcagtttatgtgtcagcactggcctgctcttcactcagaggtctcactaatgccctctcccttaggtcatagaagagagcaatgtctggcagtacgactcccttcaggcacttctgagtgagaagagtatcttccagcaggccattagctcctcggaaaagatgaggttcttccagggccgccactccagcaagcacaagcctcggacgcaaattactgctctgaaagaggagacagaagaagaagttcaagaaacccgtctctagtgctgggatgctgaggaagcaactcagtgcactgagtccattcccagaacccatgcagaatgaaaaaagccaggcatttcccatgcttctaaccccagtgctggggacacagagacaggtggatccctggggctctgtggcaagtgatcctagcccacaaagagagttccaggctgggcacctgagggacaatacctgtggatatactcttgcttccacatgcaagtacatatacacatgcatgcacattagtggacatacacacagaaaagcaaagaagaaggaaagagggaagaaaatagtgcaaataattgcaaaacgatcatgtatggagtctgctcatggacttagaggaggtgaactctactacctgtgcctttgaaagaagggtgaagcctgcgacttgctctttaagagactgttttggaagagagttcaaaaacgttcatatgggtatgggtaactgactttccagcagtagtcaaattgtttgaacttcagatagttgataatgaccacttgtgtattgcaaggcagatttttctgaaaacatttgccccctaatagtagctgaaaaagcagctataaatgccaaccaggttagtcattcggcttattgttcagtacagctggttaatttgcattattgaagaactgaaattatagtgcttagatataggacaaagtaaagagaactaaaaacagtgtcttatataactcaaagcccaacttactttcctctaagatatgtattgccttctatacattgtctgccccattccaagcaaatgttagaatattatacaaaatactgggtggtattgattgaaagatgcccgacatctggtgatctagtaacccatcaggattaaggatatccaggtcttggaaattaaggttaagaccatctagccttactaccgtacagctaaacattcttattaccagaataagacctaggaaaagaactgtttcagtcccataaagtggcctggataatttccttgatatggaaatcgacacacttatgttcccagaaagcaacagatctttaagacttctgaagtgaaggaaggttgtgttagtgcaaactagtgcagcccagtgccaggtccaggagttaacatgtagacaggccatggactgtgtgggtagatgctcatggaaatgtgcagtagtatgttcatgtgctctcagctagctgtgtgtacttcaaactgtctccacagagttgttggggagacactctgaaaaagaattaattgtgaattagttttatatactttgttttataatttgtgatgcaaatgaaaatttctctgggaaatatttattttagtaataatgtttcaaactcatatataacaatgctgtattttaagaatgattacataatgacttatatttgtataaaataatttttatatttgaaatgttaactttttatagcactagctattttaaaacaggggagtgaggaggacagggatgataaggatcattcaacttcatgttgtgaagacgagctgatgtaaatcttgtacccatctgtgtggttctcagacaacacatgctctcttttaatgcagctttgaagaagatggtaccaaaggttaagacggccccctgatgggcacatcaacttctgaactgcaaactaagctttagaggaatgtattatatttattactgtaatagaatatcatgtgtcaataaaatccttttatttgtgtgaaactcatctgttttcagatatattcattgggattcctagctctggaattcctagctctactctctatgattcttagaacacaaacattccttttagatataatctctttgagaatcccagttgaattagagcacaagacattaagttgggtctctaaacccaactagattatttttgtcaatttgatgcaagatagaattatctaggaaggggaacctcagttaacaaaatacctccaacaggttcactgtaggtgaatctggagttcattttcttgattgaaattcatgtgggaggatctagatcactgtgagctacaacacccagattggtagtcctggatggtgcaagaaattgggctgagcaagccatggggaacaagccaacagcatctcctccacagtctctattttagttcctgctttgagtccctcaaggatgaactataaaatgtaagccgaaataaaccctttccttcccaatttgctctttgtcaatgtttatcataagaatagaaacttacccagcacagtgtacaacagagctcattcttgatggggtgctgtactggctgcttttctgtgtcaacttaacacaagctggagttatcacagaaaaaggagcctctcttgaggaaatgcctccatgagatccagctgtaaagcatacactagcattttctcaattagtgttcaaagggggaagggcctagcccctggtgggtggtgccatccctgggattagtagttttggattctataagaaagcaagctgagcaagccaggggaagcaagccagcacacaacattcctccctggcttctgcatccaagtttctaccctgtgtgaattcctgtcctgacttcctttgatgataaacagcaatttggaagtgtcagctggataacccctttcctcccaacttgcttcttggtcatgacgtttttttgcaggtatagaaaccctgactaagggtcaccttgggcgcaaactcagctggatgatcccgcagcccctagaggactctctatgcaatcttaggatcactggtgaatggaacacatcatcggttccaatccaatcatgccggacctgagccagcaagcagggaagcagaaaacccacctgaccagggccttagtcccttcccattggcaccagctccaggtcgccttggtcgggaactctttgggggaaggtcccacagtccccagagggcgctccatgagatcttaggatcactggtgagtggaacacaacatctgttccacaccaattgtgacaggtctgtgacagcaggagcaaagacacgggagccttgcctgaccagaggcttgggttccttctgatcagtactggtacaccttggtttcaaacacaccagacagccccacagtcctcagaggagacacctcttccaggcgctgtaacacacccagaatcttaggattccaggatcccaggataacagcagcttgatcacaccaggatctcaggttctcagaagaagcttaactgccaagaactctgacacagccagaatctcaggttcccaggagcccagaatcacaggatcacagaaaaagctagactctgaggagtcctgaatcaaccaggattataggaagaacaagctccaatcagatatattaagggcagcaaccacttgagataatcagatggcgggaggcaagcataagaacagaagcaacaaaaaccaaggtttcttggcatcatcagaaccaaactctcccaccatagcaagtcctggatacaccatcataccagaaaagcaagacatggctctaaagtcacttctcatggtgatgatggaggactttaagaaagaaatacagaaaaacacaggtaaatagctagaagctctcaaagagttacaggaaaacactaccaaataggtaaaagaattgaacaaaaccttccatgagctaaaaatggaagtagaaacaatgaagaaaacacaaagggagacaactctgaagatagaaacgctaggaaagaaagcaggaaccatagatgtgtgcatcagccacagaatacaagagatggaagagagaatctaaggggcagaagattccatagaaaacatggacacaacaatcaaagacaatgcgaaatgcaaaaagatcctaactcaaaacatccaggaaatccaggacacaatgagaaggccaagcctaaggataggaggtatagatgagaatgaagattttaaacttaagggccagtaaatatcttatacttacaaacaaaattatagacgaaaacttccctaacctgaagaaagagatgctcatgaacatacaagaagcctacagaactccaaatagactggtccagaaaataaattcctcctgacacataataatcagaacaacaaatgcactaaataaggatagaatattaaaagcagtaagagaaaaaggtcaagtaacatataaaggcatatctatcagaattacaccagacttctcaccagagactatgaaagccaaatgatcatggacagatgttatacagacccttcgagaaaacaaatgccagcccagcaaaactctcaattatcatagatggagaagccaaagtattccatgacaaaaccatattcacacaatatctttccatgaatccagcccttcaaaggataaagagaaaactccaacaaaaggagggaaaaagcacaaaagtaatcattcaaccaacctaaaagaagacagctgcaagaacagaatcccaactctaacaacaacaacaaaaacaggaagcaacaattacttttccttaatatctcttactatcaatggactcaattctccaataaaaagacatagactaacagactggctacataaacaggacccaatgttttgctgcatacaggaaatacacctcagggacaagacagacactacttcagagtaaaagctggaaaacaattttccaagcaaatggtgtgaagaaacaaactggagtagccattctaatatgaaataaaatcaactgccaacccaaagttatccaaaacaaggaagggcacttaatactcatcaaaggtaaactcttccaagatgaactctcaattctgagtatgctccaaatgcaaaggcatccactttcattaaagaaacttgggtaaagatcaaaccacacattgtaccacacacaataatagtgggagacttcaacacaccactctcatcaatttacagatcctggaagcagaaactaaacaaagacacagtcaaactaataagttatgaaacaaatggatttaacaaatatctacagaacattttatcctaaaacaaaaggatataccttattcctggtaccttctccaaaactgatcaataatcagtcacaaaacaggcctcagcagatacaaaaatattgaaatgatcccatctatcctatcagatcaccacggactaaggctgatattcaataacaacataaataatagaaagccaacattcatgtggaagctgaacaacaatctactcaatgatacccttgtcaaggaagaaattaagaaagaaattagacattttagagtttaatgaaaatgaagccacagcatacccaaacttatgggacacaatgaaagcagtactaagaggaaaactcatagccctgagtgctgccaaaaaaactagagagagcacacactaacagcttgacaggacacctaaaagctctagaacaaaaagaaacaaattcacccaaaaggagtataaggtaggaaataatcaaactcagggctgaaatcaaccaagtggaaacataaagaactattcaaaaaaatcaaccaaactatgagctggttctttgagaaaatcaacaagatatataaactcttagactaactagagggcacagggacagtatcctaattaacaaaatcagaaatgaaaagggagacacagcaaaagaacctgaggaaatccaaaacatcatcagatcctactaagggccatactcaacaaaactggaaaatgtggatgaaatggacaaattcctagacagataccaggtaccaaaattaaatcaagatcagattaatcagattaattatctaaacagtcccatagcccctaaagaaatagaagcagttattaatagtgtcccaaacaaaaaaagcccagggccagatgggtttagtgcagaattttatcagaccttcaaagaagatctaattccagttcttctcaaactattccacaaaacagaaacagaaggtactctccccaattcattctatgaagccacaattactctgatacctaaaccacacaaagacccaacacagaaggagaacttcagaccaatttctcttatgaatattgatgcaaagatactcaataaaattctcgctaacagaatccaagaacacatcaaaaaagatcatgaattatgatcaagtaggcttcatcccagggatgctttaatatatacaaatccatcaatgtaatccactacataaacaagctcaaagacaaaaaccacgtgatcatctcattagatgctgagaaagcgtttcacaaaatcatgataaaaggcttggaaagatcaggaattcaaggcccatacctaaacataacaaaagcaacatacagcaaaccagtagctaacatcaaagtaaatggagagaagctggaagcaatcccactaaaatcagggactagacaaggctgcccactttctccctaccttttcaacatagtacttgaagtattagccagagcaattcgacaacaaaaggagatcaaggggatacaaattggaaaagaggaagtcaaaatatcactttttgcagatgatatgatagtatatataagtgactctaaaaattccaccagagaactcctaaacctgataaagagcttcggtgaagtagctggttataaaattaagtcaaacaagtcaatggcctttctctacacaaagaataaacaggctgagaaagaaattagggaaacaacacccttttcaatagtcacaaataatataaaatatctcggcgtgactctaactaagaaagtgaaagatctatatgataaaaacttcaagtctctgaagaaagaaattaaagaagatctcagaagatggaaagatctcccatgctcatggattggcaggatcaacattgtaaaaatggctatcttgccaaaagcaatcaacagattgaatgcaatccccatcaaaattccaacacaattcttcaacgaattagaaggagcaatttgcaaattcatctggaataacaaaaaacctaggatagcaaaaactcttctcaaggataaaagaacctctggtggaatcaccatacctgacctaaagctttactacagagcaattgtgataaaaactgcatggtactggtatagagacagacaagtagaccaatggaatagaagtgaagacccagaaatgaacccacacacctatgatcacttgatcttcgacaagggagctaaaaccatccagtggaagaaagacagcattttcaacaattggtgctggcacaactggttgttatcgtgtagaagaatgcgaattgatccatacttatctccttgtactaaggtcaaatctaagtggatcaaggaacttcacataaaaccagagacactgaaacttatagaggagaaagtggggaaaagccttgaagatatgggcacaggggaaaaattcctgaacagaacagcaatggcttgtgctgtaagatcaagaattgacaaatgggacctaatgaaactccaaagtttctgcaaggcaaaagacaccgtcaataagacaaaaagaccaccaacagattgggaaaggatctttacctatcctaaatcagataggggactaatatccaacatatataaagaactcaagaaggtggacttcagaaaatcaaataaccccattaaaaaatggggctcagaactgaacaaagaattctcacctgaggaataccgaatggcagagaagcacctgaaaaaatgttcaacatccttaatcatcagggaaatgcaaatcaaaacaaccctgagattccacctcacaccagtcagaatggctaagatcaaaaactcaggtgacagcagatgctggcgaggatgtggagaaagaggaacactcctccattgttggtgggattgcaggcttgtacaaccactctggaaatcagtctggcggtttctcagaaaactggatatagtactaccggaggatccagcaatacctctcctgggcatatatccagaagatgccccaacttgtaagaaggacacatgctccactatgttcatagcagccttatttataatagccagaagctggaaggaacccagatgcccctcaacagaggaatggatacagaaaatgtggtacatctacacaatggagtactactcagctattaaaaagaatgaatttatgaaattcctagccaaatggatggacctggagggcatcatcctgagtgaggtaacacattcacaaaggaactcacacaatatgtactcactgataagtggatattagcccaaaacctaggatattcaagatataagatacaatttcctaaacacatgaaactcaagaaaaatgaagactgaagtgtggacactatgcccctccttagaagtgggaacaaaacacccttggaaggaggtacagagacaaagtttggagctgagataaaaagatggaccatgtagagactggaccggggatccatcccataatcagcttccaaatgctgacaccattgcatacactagcaagattatgctgaaaggaccctgatatagctgtctcttgtcagagtatgcctgggcctagcaaacatagaagtggatgctcacagtcggctattggatggatcacatggcccccaatgaaggagctagagaaagtacccaagaagctaaagggatctgcaaccctagaggtggaacaacattatgaactaaccagtaccccggagctcttgactctagctgcatatgtatcaaaagatggcctaggcggccatcactggaaagagaggcccattggacacgcaaactttatatgccccagtacaggggaacgccagggccaaaaaaggggagtgggtgggtaggggagtgggggtgggtggctatgggggacttttggtatagcattggaaatgtaaatgagctaaatacctaataaaaaatggaaaaaaaaaagaacttcaagtctctgaagaaagaaatttaagtagatctcagaagatggaaagatctcccccatgctcatgttttggcaggatcaatatagtaaaaatggctgtcttgccaaaagcaatctacagattcaattcaatccccatcaaaattccaacttaattcttcaccagttagatagtgcaatttgcaaattcatctggaataacaaaagaccaaggatggcaaaaactactttcaacaataaaagaacctctggtggaatcaccatgcctgacctcaagctgtactacagagcaattgtgataaaaactgtatggtactggtaacagtgaccaacaggtagatcaatggaatagaattgaagacccagaaatgaaagcatatacctctggtcatttgatctctgacaagggagctaaaactatccagtggaaaaaaagacagcatttttcaacaaatggtgctggctcaactggtgcttatcatgtagaagaatatgaattgatccattcttttttttctttttctacgtggatcaaggaactccatataaaaccagagactctgacaccccctaaaggagaaagtggggaagtgcctcgaagatatgggcacaggggaaaaattcttgaatagaacaacaatggcttgtgctgtaagattgagaattggcaaatgggacctaataaaactgcaaagcttttttataaggcaaaatacactgtcaataagacaaaaaggtcaccaacagtttgggaaaggatctttaccaattctaaatctgataggggactaatatccattatatacaaagagctcaagaagctggactccagaaaatcaaataaccctattaaaaatggggtacagagctaaacaaagaatcctcaactgaggaataccgaatggctgaggagcacctgaaaaaatgttcaacatccttaatcattaaggaaatgcaaatcaaaacaaccctgagattccacctcacaccagtcagaatgtttaggatcaaaaattcaggtgacagcagatgctggtgaggatgtggagaaagaggaacactcctccattgctggtgggattgcaagctggtacaaccactctggaagtcagtctggcggttcctcagaaaattggacatagtagtgccggaagatccagctataccactcctgggcatatacccagaagatgttccaactgttaataaggacacatggtccactatgttcatagtagccttatatataatagccagaatctggacagaacccagatgtccctcaacagaaaaatatggatacagaaaatgtggttcatttacacaatagagtaatactcagttattaaaaacaatgaatttatgaaattcttaggcaaatggatggatctggaggatatcatcctgagtgaggtaacccaatcataaaaggacacacatgatatgcactcagagataagtggatattagcccagaaacagaatacccaagatacaatttgcaaaacacatgaaactcaagaagaaggaagaccaaagtatggatacttcgccccttcttagaatggggaataaaatagccattaatggagttacagagacaacgtttggagcagagtctgaatgaatgaccatccagagactgacccacttggggacccccccccccgataaacagcaaccaaacccagacactagacagatgccaacaagagcctgctgacagaaccctgatatagctgtctcctgtgaggctctgccatgcctggcaaatacagaagtcatccattggagagagcagaaggtccccaatgaaggagccagagaaatactcagggagctgaaggagactgaagccccatagaaggtacatcaatatgaactaaccagtaccctcagagctccttggaactataccaccaatcaaagaaaacacatggtggaatatgtggctctagctatatttgtagcagagaatggcctagtccgtcatccatgggaggataggcccttggtcctgtgaaggctctatgccccagtgcatggaaatgccaggaccaggaatgggagtgggtgggttggggagcagggggagaggggatggagtaggggattttcgaaggggaaactaggaaaagggataacatttgaaatgtaaataaagaaaatatctaataaaaaaagaaaagaaaaaagaaaccctgactaagacaggtactgttacaagttttggccaatgtgtaaagagatgtgcagccatcatactggctattttctatgccctgagagttctctgtgtcctcagtgtgcttcatcactcccacccaacacctggtaacttctggtgtcttcctgctttagaccttgctctgcgaggtatgatgatgatagcattgagctgcatgcagtcctttaaggccagcttctttcccatagcaataagcactgtttctctatgtggttttactgcatgatggctcattgatttttgttgttgaataacatgcccctgtctggatatattgacgtttattcacctactgaaggacctcatgtttttccttggttcattcttattcattgtgacaatcttgaataaagctgctaaaagtatagggagggagagatggagagaaagcgtgggaggggaggagagaaggctaggaggagggaaaagaagaagatcataaggaaggaaaggtactagaaaagaggaaagatgagaggcatgaggagacatgagacttgagaggaaggagagcagagag

SEQ ID NO: 983 - DNA, 6303 bp, Mus musculus
gaattggaagcaaatgacatcacctcaggtctgagtaaaagggacgagccaaaagcattgacctggtcctggatatccagatgtcgagtccaacctgaacttagccggacacagacctcattgcctcacggagacatcatgcagaagtcgcctttggagaaagccagctttatctccaaactcttcttcagctggaccacaccaattttgaggaaagggtacagacaccacttggagttgtcagacatataccaagccccttctgctgattcagctgaccacttgtctgaaaaactagaaagagaatgggacagagaacaagcttcaaaaaagaatccccagcttatccacgcccttcggcgatgctttttctggagattcctcttctatggaattttgctatacctaggggaagtcaccaaggctgtccagcctgtcttgctaggaagaatcatagcatcctatgatccagaaaacaaggtggaacgttccattgccatttaccttggcataggcttatgccttctcttcattgtcaggacactgcttcttcacccagctatttttggccttcatcgcattggaatgcagatgagaacagctatgtttagcttgatttataagaagactttaaagttgtcaagccgcgttcttgataaaataagtattggacaacttgttagtcttctttccaacaacctgaacaaatttgatgaaggacttgccttggcacattttatatggattgctcctttacaagtgactcttctgatggggcttctctgggacttgttacagttctcagccttctgtggccttggtttactgataatcctggttatttttcaagctatcctagggaagatgatggtgaagtacagagatcagagagctgcaaagatcaatgaaagactcgtgatcacatcagaaattattgataatatctattctgttaaggcatattgttgggaatcagcgatggagaaaatgattgaaaacttgagagaggtggagctgaaaatgacccggaaggcggcctatatgaggttcttcactagctctgccttcttcttttcagggttctttgtagtctttctatctgtgcttccctacacagtcatcaacggaatcgtcctacgaaaaatattcacaaccatttcattctgcattgtcctacgtatgtcagtcacacggcagttccccactgccgtacagatatggtatgattcttttggaatgataagaaaaatacaggatttcctgcagaaacaagagtataaagtactggagtataacttaatgaccacaggcataatcatggaaaatgtaacagcattttgggaggagggatttggggaattactggagaaagtacaacaaagcaatggtgacagaaaacattccagtgatgagaacaatgtcagtttcagtcatctctgccttgtgggaaatcctgtgctgaaaaacatcaatttgaatatagagaaaggagagatgttggctattactggatctactggatcaggaaagacatcactcctgatgttgattttgggagaactggaagcttcagagggaattattaagcacagtggaagagtttcattctgctctcaattttcttggattatgccgggtactatcaaagaaaatatcatctttggtgtttcctatgatgagtacagatataagagtgttgtcaaagcttgccaactacagcaggacatcaccaagtttgcagaacaagacaacacagttcttggagaaggtggagtcacactgagtggaggtcagcgtgcaaggatttctttagcaagagcagtatataaagatgctgatttgtacctattagattccccttttggatatctagatgtttttactgaagaacaagtatttgaaagctgtgtttgtaaattgatggccaacaaaactaggattttggttacatctaaaatggaacacttaaggaaagctgacaaaatactaattttgcatcagggcagtagctatttttatgggacattttctgagctacaaagtctacgtccagacttcagttcgaaactcatggggtatgatacttttgaccagtttactgaggaaagaagaagttcaattctaactgagaccttacgcaggttctcagtagacgattcctctgccccgtggagcaaacccaaacagtcgtttagacagactggagaggtgggagaaaaaaggaagaactctattctaaattcattcagctctgtaaggaaaatttccattgtgcaaaagactccattatgtatcgatggagagtctgatgatctccaagaaaagagactgtccctagttccggattctgaacagggggaggctgctctgccgcgcagcaacatgatcgccaccggccccacatttccaggcagaagaagacagtctgttttggatctgatgacgttcacacccaactcaggctccagcaatcttcagaggaccagaacttctattcgaaaaatctccttagtccctcagataagcttaaatgaagtggatgtatattcaaggagattatcgcaagatagcacactgaacatcactgaagaaattaacgaagaagatttaaaggagtgttttcttgatgatgtgatcaagatacccccggtgacaacatggaacacatacctacgatattttactctccataaaggcttactgctagtgctgatttggtgcgtactggtttttctggttgaggtggctgcttctttatttgtgttatggttgcttaaaaacaaccctgttaacagtggaaacaatggtactaaaatttccaatagctcctatgttgtgatcatcaccagtaccagtttctattatattttttacatttacgtgggagtggctgacactttgcttgccctgagcctcttcagaggtttgccgctggtgcatacgttaatcacagcatcaaaaattttgcacaggaaaatgttacactccattcttcacgcccctatgtcgaccatcagcaagctgaaagcaggtgggattcttaacagattctccaaagatatagcaattttggatgactttctgcctcttaccatttttgacttcattcagttggtgttcattgtgattggagctataatagtcgtctcggcattacaaccctacatcttcctagcaacggtgccagggctagtagtctttattttactgagggcctacttccttcatacagcacagcagctcaaacaactggaatctgaaggcaggagtccaattttcacccaccttgtgacaagcttaaaaggactctggacacttcgagccttccgacgccagacttactttgaaactctgttccacaaagctctgaatttgcacactgccaactggtttatgtatctggcaaccttgcgctggttccaaatgagaatagacatgatatttgtcctcttcttcattgttgttaccttcatctccattttaacaacaggtgaaggagaaggaacagctggtattattctaactttagctatgaatatcatgagtactttgcagtgggctgtgaactcaagcattgatacagatagcttgatgcgatctgtgagcagagtgtttaagtttattgatatacaaacagaagaaagtatgtacacacagataattaaagaactacctagagaaggatcatctgacgttttagtcattaagaatgagcatgtgaagaaaagtgatatctggccctctggaggcgaaatggttgtcaaagaccttactgtgaaatacatggatgatggaaatgccgtattagagaacatttctttttcaataagtcctggacagagggtggggctcttaggaagaactggatcaggaaaaagtactttgctttcagcatttttacgaatgttgaacattaaaggtgatatagagattgatggtgtctcatggaattcagtgaccttacaagaatggaggaaagctttcggagtgataacacagaaagtatttatcttttctggaacattcagacaaaacctggatcccaatggaaaatggaaagatgaagaaatatggaaagttgcagatgaggttggactcaagtctgtaatagagcagtttcctggacagctcaactttacccttgtggatgggggttatgtgctaagccatggccataagcaattaatgtgcttggcccgatcagttctcagtaaggccaagatcatactgcttgatgagcccagtgcccatctagaccccataacataccaagtcattcgacgagttctaaaacaagccttcgctggttgcacagtcatcctctgtgaacacaggatagaagcgatgttggattgccagcgatttttggtcatagaagagagcaatgtctggcagtacgactcccttcaggcacttctgagtgagaagagtatcttccagcaggccattagctcctcggaaaagatgaggttcttccagggccgccactccagcaagcacaagcctcggacgcaaattactgctctgaaagaggagacagaagaagaagttcaagaaacccgtctctagtgctgggatgctgaggaagcaactcagtgcactgagtccattcccagaacccatgcagaatgaaaaaagccaggcatttcccatgcttctaaccccagtgctggggacacagagacaggtggatccctggggctctgtggcaagtgatcctagcccacaaagagagttccaggctgggcacctgagggacaatacctgtggatatactcttgcttccacatgcaagtacatatacacatgcatgcacattagtggacatacacacagaaaagcaaagaagaaggaaagagggaagaaaatagtgcaaataattgcaaaacgatcatgtatggagtctgctcatggacttagaggaggtgaactctactacctgtgcctttgaaagaagggtgaagcctgcgacttgctctttaagagactgttttggaagagagttcaaaaacgttcatatgggtatgggtaactgactttccagcagtagtcaaattgtttgaacttcagatagttgataatgaccacttgtgtattgcaaggcagatttttctgaaaacatttgccccctaatagtagctgaaaaagcagctataaatgccaaccaggttagtcattcggcttattgttcagtacagctggttaatttgcattattgaagaactgaaattatagtgcttagatataggacaaagtaaagagaactaaaaacagtgtcttatataactcaaagcccaacttactttcctctaagatatgtattgccttctatacattgtctgccccattccaagcaaatgttagaatattatacaaaatactgggtggtattgattgaaagatgcccgacatctggtgatctagtaacccatcaggattaaggatatccaggtcttggaaattaaggttaagaccatctagccttactaccgtacagctaaacattcttattaccagaataagacctaggaaaagaactgtttcagtcccataaagtggcctggataatttccttgatatggaaatcgacacacttatgttcccagaaagcaacagatctttaagacttctgaagtgaaggaaggttgtgttagtgcaaactagtgcagcccagtgccaggtccaggagttaacatgtagacaggccatggactgtgtgggtagatgctcatggaaatgtgcagtagtatgttcatgtgctctcagctagctgtgtgtacttcaaactgtctccacagagttgttggggagacactctgaaaaagaattaattgtgaattagttttatatactttgttttataatttgtgatgcaaatgaaaatttctctgggaaatatttattttagtaataatgtttcaaactcatatataacaatgctgtattttaagaatgattacataatgacttatatttgtataaaataatttttatatttgaaatgttaactttttatagcactagctattttaaaacaggggagtgaggaggacagggatgataaggatcattcaacttcatgttgtgaagacgagctgatgtaaatcttgtacccatctgtgtggttctcagacaacacatgctctcttttaatgcagctttgaagaagatggtaccaaaggttaagacggccccctgatgggcacatcaacttctgaactgcaaactaagctttagaggaatgtattatatttattactgtaatagaatatcatgtgtcaataaaatccttttatttgtgtg

SEQ ID NO: 984 - protein, 1474 aa, Mus musculus
MQKSPLEKASFISKLFFSWTTPILRKGYRHHLELSDIYQAPSADSADHLSEKLEREWDREQASKKNPQLIHALRRCFFWRFLFYGILLYLGEVTKAVQPVLLGRIIASYDPENKVERSIAIYLGIGLCLLFIVRTLLLHPAIFGLHRIGMQMRTAMFSLIYKKTLKLSSRVLDKISIGQLVSLLSNNLNKFDEGLAHFIWIAPLQVTLLMGLLWDLLQFSAFCGLGLLIILVIFQAILGKMMVKYRDQRAAKINERLVITSEIIDNIYSVKAYCWESAMEKMIENLREVELKMTRKAAYMRFFTSSAFFFSGFFVVFLSVLPYTVINGIVLRKIFTTISFCIVLRMSVTRQFPTAVQIWYDSFGMIRKIQDFLQKQEYKVLEYNLMTTGIIMENVTAFWEEGFGELLEKVQQSNGDRKHSSDENNVSFSHLCLVGNPVLKNINLNIEKGEMLAITGSTGSGKTSLLMLILGELEASEGIIKHSGRVSFCSQFSWIMPGTIKENIIFGVSYDEYRYKSVVKACQLQQDITKFAEQDNTVLGEGGVTLSGGQRARISLARAVYKDADLYLLDSPFGYLDVFTEEQVFESCVCKLMANKTRILVTSKMEHLRKADKILILHQGSSYFYGTFSELQSLRPDFSSKLMGYDTFDQFTEERRSSILTETLRRFSVDDSSAPWSKPKQSFRQTGEVGEKRKNSILNSFSSVRKISIVQKTPLCIDGESDDLQEKRLSLVPDSEQGEAALPRSNMIATGPTFPGRRRQSVLDLMTFTPNSGSSNLQRTRTSIRKISLVPQISLNEVDVYSRRLSQDSTLNITEEINEEDLKECFLDDVIKIPPVTTWNTYLRYFTLHKGLLLVLIWCVLVFLVEVAASLFVLWLLKNNPVNSGNNGTKISNSSYVVIITSTSFYYIFYIYVGVADTLLALSLFRGLPLVHTLITASKILHRKMLHSILHAPMSTISKLKAGGILNRFSKDIAILDDFLPLTIFDFIQLVFIVIGAIIVVSALQPYIFLATVPGLVVFILLRAYFLHTAQQLKQLESEGRSPIFTHLVTSLKGLWTLRAFRRQTYFETLFHKALNLHTANWFMYLATLRWFQMRIDMIFVLFFIVVTFISILTTGEGEGTAGIILTLAMNIMSTLQWAVNSSIDTDSLMRSVSRVFKFIDIQTEESMYTQIIKELPREGSSDVLVIKNEHVKKSDIWPSGGEMVVKDLTVKYMDDGNAVLENISFSISPGQRVGLLGRTGSGKSTLLSAFLRMLNIKGDIEIDGVSWNSVTLQEWRKAFGVITQKVFIFSGTFRQNLDPNGKWKDEEIWKVADEVGLKSVIEQFPGQLNFTLVDGGYVLSHGHKQLMCLARSVLSKAKIILLDEPSAHLDPITYQVIRRVLKQAFAGCTVILCEHRIEAMLDCQRFLVIEESNVWQYDSLQALLSEKSIFQQAISSSEKMRFFQGRHSSKHKPRTQITALKEETEEEVQETRL

SEQ ID NO: 985 - DNA, 208700 bp, Homo sapiens
gagccactatgcccggctgattgttttcttattgttgagttttatattcctttattttggaatggagtaaataagcacaataaaactggttgagaagataatcattttaaaaaatcataatgaattatatgatacacattctattatttcatgagaaaaatcatggaagagtcagttcaatattcagtgaatcattaatgtgaggatgtaaaatttgatacacacacaatttattgagcacttatcctatgtcaatcagtgcgctaaatttttttcttttatattaactcatttaattcccactacagccctgtgtaatggaagctgttcttcccaccattttataaatgatgaaaccttagatcacactcagtggaagagttctaaagccctatgtggtgctgtctgatagaaaatatattttaaaatgagatgatctaaggtatgtttacctacagagctaaaggaaagtatgtcttaaatttaataatgagtgattatagaaacagattacaggaaatagtccatctttcttgaattatccaaagtgttacaagcctcaaattcattgttgtttgtatgagaacacatttaggtgatcggatacaagtatatagtttttcccagatgtttatttcacatcaacttttttttcatctttactttcttcaaggcaagtaggatagaatgtaataatcaaataggtttttcccccaccccattttagagcagtaaataattccaagaggcatttgctttgttattggataagtaattaacaaaaagaattcctaaagacaattagaatcatgaccatactgggtcttgaaaacatagcagtgcaatcacagccaatggctggcttggtggctggcgatgagcctgcagcatgggactgggtgttccaccacggcttggctgttgtccagggagctttcagtcgctggggttcccacagtgccaagcacgaggcaggtgcagaaaggataaaggtttctgttccccattagtgttgagggcatgcaggtcgtctgacatgaggggcatgagaagtgaagttcctgctttgctttgggtaaggaatctgcattgacaggggcttaagaacctgctcttatacctcacatgtcttagcctggcctttgagatgagtagggagtttgagtgggagtttgagtttcctcttagagaaacagaactgagtgaggcactttcattttttagtttcctagtaccttttgttaaggaaaaaaaagccaaaatgagtgttaaaaatttaaaatttttagattttaaatttgcatttaaaaaattaatgcttttttttttagatggagttttgctcctgttgcccaggctggagtgcaatggcgtgatcttggctcactgcaacctctgcctcccaggttcaagcgattctcctgcctcagcctcctgagtagctgggattacaggcgcccgccaccacacccagctaatttttgtatttttagtagagacgaggtttcaccatgttggccaggctggtttcgaactcctgacctcaggtgatccacctgcctcggcctcccaaagtgctgggattacaggcgtgagccactgcgcccagccaaaattaatgctcttaacatgtaaaaagtaaagtgcagtggaactttggcacttatgcaagataatacaacttaaaagatttataagaatattaactgctaatgaacagtagagggatctaattaacattgaaagttacatgaagaaagtgtttgtcttctattcccaacagggcatctttgtaactataatgactcttgagaagattttgttttcagtcttaaaacaggaatgggggaaaaatgtaggcctgggtaagtacaaaaaagggaaatcgaaggagactagggagttactgtagattttgcaggactgaggaaagtcagaataaatacaagagacaatgatgctggtaattttctttgggctcagagaagtaatgctttgctttgtcagagttgtagtaaaatttagatctaagaagctcgttggaagttgtagcagaatcctgtcttgtttactatgtccactgcctggcacagagatggaacactataagctttccaaaaacatttgtggaatggaatcagaaagtcactttactttccaagatgcaattctttattttgaaacataaatatttaaaaagtttataaatttttgacataattatgacatacatccttccaggcttttttcaatgcttatgcaaacatgtatatgtgacctgtaggtctccttttacccagtttttggagtacaaataaggtcacatctcttcttaactttaaatgtttaaaacattgaagttagcaagaagcccagaaactttttctaaagaactttttctacccctaattgtccaagaactccaagttttcttggttcaaagaggtaatttctgtttctaaacactagaaaaaggagaatatgaaggatctgactagtccattgtcacatgccccaccccattttctgctgcaagagcctctgtcaccacagcattgtgtcactgatgaaaataggtcctcccacagagtcagatgcatcccagtctattgctactattatcaccctgttggaacagatccctgcacaggtcacagcagttcctggaagatgaaactcattctcccagccttaatatcagccaggaatactttattcttggacttccaaagttgctatagtagtttccaaagcccacctagcacctaaggatgggtgagtaaagacaagcttccagtttcagctgcagaaacaagaacccatctcccaccacatagtaggtgttggcattaaacttctctcttatgatgtaatgtgttctccttgggatctttggtatttctgtttgcatacttcatttggggtcatctcaacacaccaaacagattctaactacactgaatctcaaaagaaatagaagtagtctttgtcaagccacagaaaagagcttgttcttctttcttctcctcctagacacctgcatacttttcattcctctaatgaagagggtccattcaataaattcagaagaaatgaagaaaaaaatacaagtctagtttgtgataagtccttgttttcacctaaacagagaagcaagaacataaattatataaggcaccttctcttaattaaataaacaaaagagttctatgtggtctagttacacagagatcacagtgattaactactcagctctggagccagacaactgggtttgttcagattctggcactctttcttgaatttgggcatggcatttgaccttctgtacctcagtttcttcatttgtaaattgggatgttaataataaaatgtactaactttatagggtctttcctgaggcacataatgtaatttaaacaacaaacaagtatacataacagacatttttttcttacaaagacggtaccatactaaacttaatttgctttttttgaaaaattatatttttaggtaaaactttgtaagttaatttttttgggtgaaaaacatgatacaaatttatcaatttgattttgcttcattagcatgatatactttgttctagaaagtacttaggcaattttcatacatgtctttaaatataatttttgcacatgtaaataagagttccaaagtattttgccatcacttcatcagtgttgcctctcaacagcctttgaagcgaggagatgccagtcactgtctcagacacaaggatgcaggctgtggaggccagtgagccatagtcactgaactgggaattggctgtccttttgaccatacagattaatcactgtagtttcaccaatcacattgaacttgaagatcaataaatgaccctaaaacaatgagatttcatagactctttctatatagtggaagttaaagcaaatcagaaaggagtccctaaacctgtgaattcttgaattttagttttccaggtcaacaagccttctttaagtgacttcatgtcccgtccttggtttttgatcatagactggtataagaaatgaccataaaataaatgtttttgagaaaattatagctgaaaatactgtccatgataccactcagtgatataagtctctaaacagcaaactcttccatgaatggggtggagggaagatggtttttctttccaggtgaacttacatattgccttttctcagatatcagattatgagaataatacaatggactgggctttgacagccaagactttcagaattgctgttagtgcccatgtgcaataaaatttttctatcatgtctctcttattatttcaaatgccctgttttactgttttgattactaattatctatttagagggaaacagttataaataaataattcactgttctacttactgtgcacccctgcctttctaaatataactcttctatgtagcatgtaaattaccacagaactcatctcagaaaaaagatcactacttttctttttagaattcaaatttataatatctaattctataggtggcatctggcctttagcatgatatcaccaatgaaaatttaatctgtgttatgaattcccttgtttctagaaaagcttcagcaggaaaatgagaagagaacccataaaaaccataaaacatttcatgaatggtagctttagaaaatcttacaggatttggtagcttttacatttatgacaaagtgatatttttgatgttgttcataattatttcagttcattagcagcattaataagctcccgttttgtacagcttgaagatctttaagacttccttaatgagaaactacctttaagctacggaagacccatcagggtgccaaattccatctggacacagttacaaatacaccactgttgatgagctgaaaattagagcaaccaaacaacagagctttaaaatgttatttcaatgcaaagggacattttcaccatagaaaaatagaagtttgcctctaaataaaaatgattttacaattgcaagagtacttgatttacccctttacatttagttcaaataccaaaaatttcttaaggaatgagaaattccaatgttcctgagaattctgatagcttttagagagttcagttttctgtagcattccattttgcaatcctatacaaatttctaatttataaccagtggtatgtaatgataatttctaatatttattaagtgtttattgggttctaagtgctttacgtctgatatatgtatcacatttaatttatttcatccagtggttcttaactggggacaactttgtacctctctccccaacatatttggcaatctctggagatagtcctggatctccagatctatctgtcacaacctaggatgtatgtggtcctacgagcatccagtgaatagaagctagagatactgctgaacattccacagtacaagggcaacccccacatcaaagaattatccacacccaaatgtcagtagtactgaggtagagagaccctaacttaatctgttcaacaatcctatgaggtgattttttttttttttttgagataaggtcttactctgtcacctaaactggagtgcagtggcatgatcacagctcactgcagcctcgatctcccaggctcaagccatccacctgcctcagcctcccaagtagctgagatcagaagcatgcaccaccacacctggctattttttttatttttttgtagagacaaggtcttactgtgttgcccaggctgatctcaaactcctgagctcaagcaatcctcctgcctcagcttctcaaagttctgggattacaggcatgagccatggcacctgaccaaggtgagtgtatttaacctcattttcaggcaaggaaacaaaagacagaaaagttaagtagcttacttaaggtcacagagctaagtgtggtgccaggattgaaaacctagttctttattgctttagcacaagctatttccactatactctgtcatgttcagagaatgttgatgtccatcagtggattctaaattttgaaggatggagatactgccttattctgtacatctgctttagcacccaagctcttgcttggtgaaaaattaatagtaaacattcatcttttgagcatcttcaaatatcccctttagaatgacattcaattattaggtcagtaaccccaagagaaaacggttgtttgagtgtatatactgtattacaaaataaggggtgaattcaaaggaaaacataagatgcaattcgtgcctccaaggaggttgtagggaagaggggttatgaatgtatgtaaatagaagttggtgtgcgtgtgtgtttataaacagaattgtcagaccaaacattattttggaagcagtaaaagtaaactagaatctggcctagtcatgtcccaggacacctctttcaagtcctgaaacatctttgtaagactgtaatgtgtgtttacatcctaggtaatcactgtggcccactgttgaagagctgtggctgttcttacccttctagcttagataaacttataagcacaaccagactacatatatgaagctgaagagaccttgtctttttttaacgagcttttcttcccgataggagtgactatttcttttcttcttccacattttcaggttttagtgtacttgtgattgctacccacttatcactattaaagtctactcaggagagaatctgagaaacactctcaaattaagttgaacatgatggataagtaaagtattgtgaaagttcactctcatgatttctaatggtgaaacctggcagggtgactaatctttgacgagaaggttatcacttataatctttcatatattgagatcatttgtaagaagcacccagcacattgctgaacacaaagtaggtattaaataaatgttggcttccttttctcctactcatcctcgctcttctttttaatatacctttaaaatgatgccacagaaatggccacccaatcttctatatttaaggtcagttcttgcattaggaaattctataggggaagtatgtgaagtatgtgtagtcagtcattaaatgcttgggctctggccacagattgtttaggtttaaatcccagtttcctcttttattattaattgtgcaacttgcttgggaaaacatgaaacttgtttttcctcaggttcattatctgtaatatatagtgaatgaagaagtttcctgtcccatgaaggtgttgtaaagattaaaaaaggcaaattaggctgtgtatttgtcataataattggcatatatggtaagtgaccaacaaccataaggtattataaaattgttataaaatgatatgagctatcattgagcagcatgaaagaagagcttcactgtttcacctactatcaccctggcccattaatctctttcctgttcctgacatttcagagatacgtttaggatttcaatcatgaccttaagccacatttgaacaattttctggtggataagtcctcattcccacattatgtatgtacctagatgcaaatcctgaatatcatgtcgcaattagtgcatctggacatgcttgctaactgtgttaaagctctgaataatggtaaagttttatttctaccaaaacaaatttgggctgtaatgttttatgataaaaatctgtggtcttcctatgtacatgtgtgtgtacatgcttaaaatgcaatgttatagttaaatgtaattcattaaaagtatgtaactccagtggctacttagtttggctacttggtttgtagatttctgctttcctgtttcattgttaaacaggtctagaagttattatttcatgaaactaatgtgaggaaaaagactatgttgatatataagtgacattatataaatacatgagggatgatttgattagaagcagtattacacagtgataggagtaatggtttagaactagactcaggtttgaatcttagctctatcattataggcatttacttaacttttcttgtttgcttaactgaaaactgaagataataacacctatttacatggttgttataagggttatatgaataatgtctggcaaatagtaagaactcaagtaactgtttcactctttccagaaggagattggctgaaaaatatttggagtctcctccagccatattccttggtcagcttctatgatcctctttggagcttaattcttaatccctttattttcacttgcttgttgataacaaagaagaactaattattaatttatttcaaaatgcatgtattatatttgatgggccacactaacagttataaaccaaacaacagattgggaatggggaagtggatgtggtgagttcaatcacatgtctgggaaaagtcaatagtgaagacagagtctcacaattttttgtcataatggagagatgaaaacacaggtagaggatttcaaacaacagagtggatggtgagttaaaaatgctgaaattctttcctggtgtctaacttaatgcaatgtggtttatctctttgctcttttctctactattcaaatttaggataataaagattaaatgtttctaaatcttactttacaatatcaagaaaaaaaggtatgcttttgcccacggaagggcaaagcagagctatgaaaacctgctgaacacattctttattttcaacacaggttcttgtctttccatcatgaaatgcacattttatttgtactgtatttgggtgaccacaagtcaacaacaagataattcacaagacccttgccttagatgtgtcggcaataaagtaatcaggccaaaatttttactttcctttgaatttttcaattcaaacacaatgtatgcttgcttttacacagtagggttcagggattagagggttggctctttaaaaaccgtcagagacacaggcaatcctacacaaaattctcagaaggaaggcgcctacgcctgggaatgcccagatgcccctcagagagttgaagatggcgtttctctgagtcaggtcaaagttaacacattaccttcgcttcaaagactgcttggcttcctttcggtggattagtcaagatgttttgctgactgagactaggaaatctataggagggcgggttagtttacattgttccttgtcattatcgctaaaacactccaaagccttccttaaaaatgcgcactgggctaaaaaggatagacaaggaacacatcctgggccggtaattacgcaaagcattatctcctcttacctccttgcagatttttttttctctttcagtacgtgtcctaagatttctgtgccacccttggagttcactcacctaaacctgaaactaataaagcttggttcttttctccgacacgcaaaggaagcgctaaggtaaatgcatcagacccacactgccgcggaacttttcggctctctaaggctgtattttgatatacgaaaggcacattttccttcccttttcaaaatgcaccttgcaaacgtaacaggaacccgactaggatcatcgggaaaaggaggaggaggaggaaggcaggctccggggaagctggtggcagcgggtcctgggtctggcggaccctgacgcgaaggagggtctaggaagctctccggggagccggttctcccgccggtggcttcttctgtcctccagcgttgccaactggacctaaagagaggccgcgactgtcgcccacctgcgggatgggcctggtgctgggcggtaaggacacggacctggaaggagcgcgcgcgagggagggaggctgggagtcagaatcgggaaagggaggtgcggggcggcgagggagcgaaggaggagaggaggaaggagcgggaggggtgctggcgggggtgcgtagtgggtggagaaagccgctagagcaaatttggggccggaccaggcagcactcggcttttaacctgggcagtgaaggcgggggaaagagcaaaaggaaggggtggtgtgcggagtaggggtgggtggggggaattggaagcaaatgacatcacagcaggtcagagaaaaagggttgagcggcaggcacccagagtagtaggtctttggcattaggagcttgagcccagacggccctagcagggaccccagcgcccgagagaccatgcagaggtcgcctctggaaaaggccagcgttgtctccaaactttttttcaggtgagaaggtggccaaccgagcttcggaaagacacgtgcccacgaaagaggagggcgtgtgtatgggttgggtttggggtaaaggaataagcagtttttaaaaagatgcgctatcattcattgttttgaaagaaaatgtgggtattgtagaataaaacagaaagcattaagaagagatggaagaatgaactgaagctgattgaatagagagccacatctacttgcaactgaaaagttagaatctcaagactcaagtacgctactatgcacttgttttatttcatttttctaagaaactaaaaatacttgttaataagtacctaagtatggtttattggttttcccccttcatgccttggacacttgattgtcttcttggcacatacaggtgccatgcctgcatatagtaagtgctcagaaaacatttcttgactgaattcagccaacaaaaattttggggtaggtagaaaatatatgcttaaagtatttattgttatgagactggatatatctagtatttgtcacaggtaaatgattcttcaaaaattgaaagcaaatttgttgaaatatttattttgaaaaaagttacttcacaagctataaattttaaaagccataggaatagataccgaagttatatccaactgacatttaataaattgtattcatagcctaatgtgatgagccacagaagcttgcaaactttaatgagattttttaaaatagcatctaagttcggaatcttaggcaaagtgttgttagatgtagcacttcatatttgaagtgttctttggatattgcatctactttgttcctgttattatactggtgtgaatgaatgaataggtactgctctctcttgggacattacttgacacataattacccaatgaataagcatactgaggtatcaaaaaagtcaaatatgttataaatagctcatatatgtgtgtaggggggaaggaatttagctttcacatctctcttatgtttagttctctgcatgtgcagttaatcctggaactccggtgctaaggagagactgttggcccttgaaggagagctcctccctgtggatgagagagaaggactttactctttggaattatctttttgtgttgatgttatccaccttttgttactccacctataaaatcggcttatctattgatctgttttcctagtccttataaagtcaaaatgttaattggcataaattatagactttttttagcagagaactttgaggaacctaaatgccaaccagtctaaaaatgcagttttcagaagaatgaatatttcatggatagttctaaatactaatgaactttaaaatagcttactattgatctgtcaaagtgggtttttatataattttctttttacaaatcacctgacacatttaatataggttaaaaaatgctatcaggctggtttgcaaagaaaatgtattacaaaggctgctaagtgtgttaagagcatactcatttctgttctccaaaatatttcataaggtgctttaagaataggtatgtttttaaaagttaagttcctactatttataggaactgacaatcacctaaaataccaatgattacaaacttccttctggccttctggactgcaattctaaaagtgtaaaaaacatattttctgcattaagttaggcagtattgcttagttttcaaagtggtaggctttggagtcagattattttgattcagatcctacatctactgtttagtagctctgttgcctgaggcaggtcccttaacatctctgtgtgtgacttgacctttaaaatttggagactgtcataggggttaatcccttgagaaaatgaatgtgaaaagttagcctaatgttaactgctattattatggattaccatattttcacattcatcacagtacatgcaccttgttaatataagatgctcaattcatctttgagtataattttgtgactctcaatctggatatgcaatgagtgggcctgtatgagaatttaatttatgaaaaattgtgtttcacatggccttaccagatatacaggaaacacgtcacatgtttctattgtatgttgttaaatgccttagaatttaactttctgaataggatcccttcagtttgagagtcataaaagagtaaaattattatggtatgagttatagattgtattgaatatctctttatatgtctaggttttgtcattggaaaaccaaaaagtttggaaaaaaaatctaagttatttcttactttcttaattttgtgtggatttcacatcaagtataaaatttgaagaacatctgaactatcataatccatatatatatataaaataaacataatctaagagagaatttcaccatgaaaaattcaggtagttcatgactatcagagcaaacaagtacattaaattgaaacttttatgaaaataacatttatgaaataggaagctatttttaaactagaagtgatatattagcatataatttataattcatatacaagtgggattgatttataaatggtcaccaacagagattgtgctatttaatttgggaaaattttttaaatttacattttctcacaacttttaaggtagttattcagtttgttcctctctgtctcttctctcatgccctgaatttttcatatttcgtttagttgtaagagtgtatatcaaaccgtgtgtcacatgacataacttgaattttcgtcgtgatatctgtgctatgtctaggtctatactgaggaactgtgggaaccccacagaatccaagtatacagtgccactgatttcttacaagggatgtggggtctcctgtaaactctgcagttagtctcaagtaagaccaaagagtaaaatattgttaggatctaaggtggaaattcagcaaagaatcacatagtctaagtctcgagtttaacagtaagataatttgagatacttttgtaattattaaacacaaagtaatgagagattttaaaacaaacaaatacacctgaatttatatatcagaataggtatggtggttcaaaatagctatctaataaaaaccacactcctattctaaacatttgcctttgatcaaaataattttgggtctcttattatgaaattgcctttctaaataatacataaatttcttctcataagtatatattagccacattattttattgttattgttttatattcatagcttgctttagattaaaaattatattacccagactggtctcttggacttgcttccaagtgacttttgactgtatcacaaaatcaaattcactctgaaaatataaagatttttcatcataatttcctttgttaacagccaagtgctacctaattttaggtgttttcattaaaaaaaaatgcattgcaaactttaaagacaattcttttgtttgtttgtttttaaaagacagagtctcactctgttgcccaggctagagtgcagtgacacaatcataactcactgcaacctccacctcctgggctcaagtgagccttccatcttgcctcacgagtagctgggtcttcaggtgtacaggtgtgtaccaccatgcctggctaactttttttttttttaagttatatagagacagtatctcactatgttgcccaggctgctcttggagctcctggcctcaagttatcctcccactcagtctcccaaagtgctgggattacaggcgtaagccacctcaccctgtcagcctaaagacagtgcttaatgaagagaaatataagtgctttgagcaatggaagtataattaaaattatactatgaaagatttataaagatgaccattttgaatgggaccacacttatttggttatataaattatgatacactattaaaaattcatcatgatgattttgtatttacattttatttacatgtttgcaatttgtgaggaaagctaaaattatggctaagccataaatatttttgcagtttgttgagggtgtttgtaaaagtgttgccaaggaagaccagttggctacccaaacaagggtttagtctaggtctgatcaatacatacacattatctcaggtttgtctatcagaaaaaccttaggttatccaaatcaaaataaaatagatgcataaaacaaaggccaatatgtgttgaacaattatattgtgatatacaactgccaagcattcccgattaccatgactccatttagtcagtccatgggcaaatgccatcaatgaggacagcccagggtttccatattctctcttggctttacatcctataggaattggaggggcccacctctgggataggagcccttctgtcttgaacaatgttgtctgaacactaacaaatgttgactttctacaccagtccctcaatagtcttttctatttatccttttgctgaccatgttttgttattacacagttgagatttttcagctgggaatctgtgttaattttgtattaattttgattagcttaactctcagagttctaaaagtacctcctgtacctgatatatgacaaaaattataattacatttatttatatataaaatatctttgtatatgtaaaatatctttgtatatataattatataattgtttcttttaattttgcaaattttaaaaagttctcctttgttttgaagtttattcctatagttttttatatgctagttaaattattaatcacttgattcaagtaatattcttatatacttataaggaatagtgtagttttaatatttaattccttgctaaagagagaagtggaatctatttttcttagctacttcatcaatattttatgtttgatgtgacagtcaaaatatccctcagagctaactgttacactagggaaatcacggttttccagttttccatttatgtgttatgggagggagtggaacttagtgtaataatattcaatacataaatgttaacacttgtttaaaggtccttgagtgagtactgctataaaatgcattattattgctagtgtcatttcacaagagcctataatttcagtgtgatagagctacaatataagtatagtattgcaaaaccatcaggaagggtgttaactatttagcatgcagttatgtgttggttgtcaaaacgttaaaaacatctctgactcagcagcaattttggcaattttgatcctgaggcatctgtgtagggcatcttcctggagaaaaacctctgagatgcaatgaggtcaaaaggggaaaacagactatgataaagatcaagttgtttggagatcttgtagaaagattaatttacaaatatgtcaagtgcattatcatggaggaaaacattgctatttctgttggttctcttcagagctctagaatcaatttaccacatagttgtttcagtgtgaaattagcattacagagtggctttacggctttactgtagggcattgtgtcagcaaagagcttaggcttcttttagcaagaagcttgtaaaaatttaatttactcttagattgcttgatgtagagaattacattcctacagagctctgaaaaatcttttttcagagtttttcacagctgtattcaagttgcaaggcttgtcaactttgctatttttctgtgcagctctgttaacttattattatcttttgacataaattatgattccaaattgtaaagctctggatgtcagggccttttctaatttgtttagtatgatattcagaccatttcaagactcttccgtggaacaatttaataaagatttttttgtgatgttaatgagttcatggtgatcaaccctagagacctgtgtctattgtagatcgatgacattcaacagtcctgcagtgctggcatcattttgataaaaaggggtcaaagcaagtgggactgtgggcagatttttaatgcttagaacaattattccatcgaagttttcttgtgtcccttctgccttagcctttgtaggatagcatgcttgctaatttcttgctcatggggtaaggaaatgaagatttttgctaggtccgtaggattattaggactactcaggcctgaagctatgcctggatatagccagaaaactctcccatagcttgctccaaggagctgagatacagcagtacttcctttgtaggtcatgattctgggtaacctggaagatgacctcattcatattctgtattctatgtgagacgttaagaaggtagaggtggccaagaaggaaattgttgctgcctttatggaacaaattatctgaaacccagctttctcgagggcttcattgaagtactcaactggggcacttaacccagtctaaggctggtcaaggaaggcttgctgggggaagtgtcttttgtattcacacctaaaggaggttattcaattagaattatccaaagagggtagggatgggctaggaaaaatttaaacaggtagtgtggaggactgacaggataagtaagcatggcaccttcaaaatatcctgagaagttccctatgacgggaacataaaatatgtgacagagatttgtgggagatgggtctggaaactctagcaggggccagatcgtaagggggctttgtaggctttgtaggctttgtttgggctttatcatactggaagtgaaaagccatggcttttaaacaggagagggacataatcagttcatatactgttgcagttttgtaaaagaaaagatgagctgaaagagtggccatggtggaggtgggtggggtgggggggagggggcggggagagagagagagagagagagatttgaaagacatttaggaggtaaaatcaactggtttggtaatcaattagtagttgaaggtgaaggaaagagaagagttaaggataacatctatatttgttgatttggataatagaggggacagtggtgctgcttattgaatgagaaaatttaatcggagaagaaggcatggagcaggagtgcagacctatgtgactctacttctctcaaaaccagaaacggaaatgatgtatatggctcagggttaggtaatatggttatttgaaaatgtattaaagtgatttagagcttagtcttaggtaagagatataagatgtctgaggtgacagttttataaatatgtagagtgcccacttgtttggccttattgtggcatagtgtgacctgagagtgttaggaagaagcagctgagttctagggacagtactggttaaattctacttagaaattatacttagaactctcctatataacctgctaactgatgtctgaacctcctgataacttcactcctttaggcagtgcttttcacatcacgggacacaacatatgagagatcatagaaattcaatgtggtatgaaaatctgcttgggacttcagatattgtctccagtgattgaataaaaataggagctcacctactatgatgaggtttctgtgtgtgttaaaagaaggttttcattacttttgaaaaggttatgtatccttgttttatgttaaaactttgagctttgttaaatatgcagagttctctttcttagcatggactacagaggtgcaactacctcctacctgacttcacatctactcccaaatgcctagtgaaggcttaataatttcaaaaagggactctagaatttcatttgataccagtcagacaaatgtgtgaaaattaagcataataggcagaatcccaggggtactgacagctgtattaagaggtgattcaagggctaaaccttagagtccagcattggttatgggtgtgacaagaaaatgaagcctatgttggctgggattagcaaccacagttctagaggaagcaaggtggagaaactatatagggggctccctttgtacgttttatttattttaaacatctctataaactctagaaattaaaacaacaataccaacacaaaagcatcactttttcgaccaaagaccattgctatacttttttgtgtaaagggctagatagtaaatattttcagctttgtgggccacataagtctctgcaatagacaatatgcaaacaaataagcatggctgtgtttcaattaaactttattatgaacattaaaatttgaatttcatataacttttacatgttgcaaaatattctttatttaaattctattgcaatatgctttaaaagatacagtttttagtctttcttagtttaaaataaaatctagaaaaaattttaagtcttctataactttttttcggtaactgaataattttaaaagtaagtgaaacatttagacatgcaaaatggacttttcagaagaagaaaatggtagcttaacagttattagattattgtccagaataatttttgacttataagtctctgttgaccatttcattgcctctttttttggaatatgcatcttttaatgtgtccttcaaggcaaaggctctatcttatctatcttgtgtcttgcattttcccagggcaatgtttttcacaatttttttaaaaaacaatactgtaatcaattttcaaataaaattttccatgggaccgcagtgtatacaaatagcagtgacaataaaagataataactctcccataaatacaaagaaacagttaacctagtgctctaaagtaaaggctacagtgattttgtataacatttatatgtaattttcttgatcctacatggttgtgtttttcacagtgttatgtttctgaaatcgagatgccttttataattgatgtcaaaagaaacttgtcagccacaaggcccaggaataagttgtaatatgggaacttagcaatacataaaggtatatatactcctgtgacctcagctgaattatttgcattggttgcatcccacaaggttgactcttaaataaatttagtttgttgcttgaaatttcttgggataaattactttgtgatgtagttttgaaaaaaaaacaggtaatatttagtctgaagtttgtctgacatactaagcaatgtaattaaagtagaagtcgcctaagctcagcactttattatgccttgaaattatactgcctgtcctacaggtgaaggtgttatgaatgcagtttgtcactgtaactctattcatagctctgaaaggctgagagtgactcagaagaatatttttgctctgaatatgaagaacgcttagactaaaactttaattacgatgctgaagaagaaagtggtaggtgattgcatgaataagtatgtaatattgttaatttctaaaaactgtgtatagttaatgtagtgcttctttttggaaaggctattgttaaattgatggtaaattctataaccaatatcaccttaaagcaagtacgcatgataaagtattataaaaccatgataatatcatatgtggcttattattgttccctgagtgttgtacaactctgttatgctgtgatgaaacctcatgcaaacaggtatgtcaaagatatgatgggctgttaactgagcttggcccacatatggtgtagtgacatgctcactaatgcagtgcagagataaccaataacagatcataacaggtttaaatatgtgcaaggagatgtcagcagaagctttcctacatagtgaatactaaacaagcctgacagcccaggatcatgttcggatcaatctagtgtgctaaaattaacatatagtcctacatttgagaatgtgtgattttcttggttcctgtctataaaataatattttaaaatacatacatttcaaatcagaagttggtgaattcactgaaatatttctagagaacactaggtattggggctcatagtgtgaaaaccactgacttaattcttcccccatcttggttgttcctgatcttcccttgtgtccccattccagccatttgtatccttagaaaatgatctcatattctacttcatctttatcttcattgtcaactgtcaggtagcaatatatgatggaagaagcatgtactttggaatcagacagacctggctggaatcctaactctgtcacttattaacaatgtgatcttaggcaatttacttaatctctctgaacctcagctactctcgtcagtacaatgagttatccttatctttacatggcacagtattattatgatatcaaaaattcattgagtatttactctgcatattagtcaaggttctccagagaagtagaaccaatgatacacacacacacacacacacacacacacacacacacacacacacacaatttattataaggaattgacttacatgattatgatggctaacaagtccaaaatctgcagtatgggtcagctggcaggaaacccaggagagtcaatgttccagtttgagtctgaaggcagtctgttggggaatttcgtccttctctgggaggccagcctttttgttctatacaggccttcaaccgattggatgaagttcacctttattagtgagggcaatctgctttaaccaaagtttactgatttaaatgttaatctcatccaaaaacacccacccagttgacacataaaattaaccatcactctctgtaagcactttctatgcattaagtgatagcaaataatgccagacatagggcgtctttaataaatggtaagcactgttatcagcaacaacaggattattataattagcaccttttcatctttctgtctgggctctgagaaagtacctctcttctctaaatttatccctcctttcctatgaattagacccagtgctttctctgaattatgaaggtcacactcctacaaatgccccttcccaattgcacatctgtcggctttctttgccattgacttttatctctagcttttaaatttacaggcatatgtcagttaacaatgggaatgcgttctgggtaatatgtccttaggcaattttatcgttgtgagaatactatagagtatacctacacaagcctagatgtcgtatagcctactacacacctaggcaatatgacatagtcttttgcttctaggctacaaacctgtacggcttgttactatactgaatactgcaggcagttgtgacacagtggtatttgcatatcggaacatgtctaaacacagaaaaggtgcactaaaaatactatgtagtgatctcatgggaccaccattgtatatgcagtctgctgtagactgaaatgtcatgcagtgcataactgtatcttaaatactcaaagtatcacctttgtttgtttgtccccttgtgtgcatcatcctaacgtggaatttctctgttgattagggccagcgtattagtttgctagggctaccataacaaaataccacaaatttggtggcttaaataacaggaatttattatcttatggttttgaagactagaagtacaagatcaaggtgttggcaggtttttcttctaagggccatgaggaagagtctattccatgcctttcccctaccttctggtggtttgctagaaatccttggcattccttgacttacagaggcatcaccctgatctctgttttcatcttcacatggcattctccctgtgagcctgtctctgtgtccaaacttctttactattaatataaggacaccagtcatattggattagggtctactttagtgacctcattggaatgttattacctctgtaaagatcctatctctaaataaggtcacatccttaggtaccgggggttaggactcaaacatacctttttttggggaaacacaattcaacctataacaattgataacactctttaggagcagaatgcgatatggaagtaatttgagaccataaagtatatacatgtagggagttaatctatgaaacctattgaaagccatatatacctcatgtatagtggtccataaatagcatggagacattgcagaggatgttaagtgatatgatacaggaacaatccaagaaggtcataagaaaaaggaccttttgctcttgagaggactgaagaatgactttccatttatgaaattttggtacatgtccactaaaaataggatgaaggccaaacttaggaagaatattttgataatggagaaggttgcatataaaaacattttattgaggacaattaaataatgttggctggaagttttaggatgatcatctttaggactcagaaaaagagaagaaacattattaaagaattgtccctgaacaagtataggcaccctcacatttgcattgcatttactatagaattgaaaaatgttttgaccttttttttttggcttttaatatatttgaccaagagtaacagctaagcaatacctatttgcaatcagtgtcatcatgtgggctccaaacatatcatgtttgtgtaattaattgattgacccattaatttgttcaatttctgctctgttccaggcactgaacaacatgatggagataaaagataaatattacacctgccttgtcctcaagaagttagtcttctgagggaaagaaattagcaaacaaattgtaatctcagttatgtgccatgttccatgctgggcacaggggatacagtagtttaaaaaaaacacaagatctataaggtgtttcttcttgtggaccttacagtctagggtgcttggaaacatggggcgttggcagacaagtaaatacacattttgtggtaaaggctcaggtagaagaagtacaggatagaatagagcacaccatggggaattaatctagacttcagagaggctcacacatacataatttatgtgtgactatttcaatgcatttgaggtttcttggaaatagaggttaggttttattttaaggaagttaccattttttttttcagtgtgatgtggttgaaccaaagaatgccatgcccagtgatggtaataggataatctttttaaaaattaagagccacctaataaatcaatagtttcattcagcgggagctcctgcagagttcaaaaagaagagaatctggcacagcgtttcctttaaagttcattttcctagagtgtgaatggaagcaagagattataacattttgaggtcaaaaaaattctgaaatgcctataaaaattattttctccaaattatcatcatttgtgcttttaatgacctgattgcaaagatgaacattttgaattcttaaattgcttattaggattggttaatgaatcaattatctattactgtatgttttgctattggaaaaaatagcaacttaagtgttttgcagacctttacttaggtatatgttgcttttatgaaaaaaaagatgtaaatattaagtaaaagggatttaaagcaaggcttttgaggtagagtcttattaattccttggtaaaccttgagccaattgttgtctatgttctctgcctctgtcttgctccttccttctgggattcactgtgggaatgcgggattgttaatctggggatgctgtccaatcctgcctctctcaagctttgctattgatctccctcccagtgataataaagcttgaagaaaatgaaagtagcgttagtattggtcctcaaactcaagaacaggatgaaacttaaatcttgagtcatacaattgtgtctacatactgctccccaaaaagagaagtaaagaagatgctaactttcccttttaatttgcagtacttagcaatttgttttcttgagggttaagtaataacagtggaagaaaaaagggttaaaatgccaccaagaacccaattccatgtttagtttgaaagtgggaaatcagctgccactgggaagtctgaatccaatgccatgatgttctttgaatccttctgagaaataatcatgtgtagccataacatacctgtataacagagcagagaacataaacaaatgaaggtgaagggaagattaagacagaagagaaaaattccagaatcgactgatcatttttatctgtttagatgatttcaggcagaatcctagagaccaactttatcacaactgaattttaaaaatcaccagctttgtcattgtgatgcagcatcagtttcagtattatccttggagtattaattcttaatcatcttcatcttagaacatttttgaggtcacttctagtctctatttcaccagtgaagaaacaaaaatccccaaactatatcaggtggaattacacagtattttttttttaattttggggaaagtcgattcaaggcagtaacttgcaagctagtgttagaaaggatttaataaatagtggtttttctgtacacatagtgagaggtcattacatcatttggttgttgaaagtcataaggatgtctagcatgcgctttgcctgtagtggttcatgccaggcagattcctgactcctataacccagagcttatcagagcatttatgtccccaaagagaaatgtcacctccatctttcaataaacactttagcaaagaaaaatcaagtactttaattccaaatcttgagttaattccagaataacaatgatggctcggaaaaatatgggtatttctgtcaaaggacagagaaacctagtagagagtatttactttgggtcctagtgatggtatctgaacaagctaggtgaacaaagagcctcaataagggattttgaggtctagaaaaagagaggaaataccaaataaatggaataattataaaataaataccagcaaagttaaatcaatatatcatgtgggagatatccttatatcactcatgtgatttctattttgttcctatattaggccaaggagaggtggaacttgttttcctttttccctctcagctacgaatggacatacttaaaactgtttctctgcttctgttctctaaaatgtgattgtctaacagtaaccgtgatgacgttttgacagttgcacaagtttctttctttaagctttaaaaatgccagccagtaacccagtggcatttctactataaaatcttaaggccaatccatttccccttttccttattttcttggtttcaaatatatttttattgccaatggaaataaaaatcctaaattagagagcaatggcatcccttgtcttgtgaataaagagctcctaaatgtgaacttatacaggatgcagcaatttatagggtagttaatcattcttctttctagccagttgttccagctacagttttgtggctcttgttagtggcttcattcccagatagaataaaaatcaaaccaaaatcctggaaaggcactctgaggatgcttctctaaagtagatgggcatcaactataaatcacaatgctttgtttcctctgttatgtttcaagatgggtgggattttttttgtagcattacttattattgcctctcaagtgcttgagtctttgaaatccaagtcatgtgagtgaattagatacagctgttagaagtggcctttcaatgccaatggtacacattccttggtttctttacgatactattgctcttacaacttttatctgaagtcataaattcatagttgtcccagaagttaagttccttgcttctagaggacagaaaacaaacaatttacacaactcatggtgcatgtcaccagtccttagatctcatgaaatatgcatgaaatcttaaatcacttgctgtagccacccagccattgacatatttgaaagactttagtgtatcaaagtcactataatgaaaattttgatttcaccagttctaggagtgaaaaatcaaatgtttagtaaaactttctaaaattaacactgacagttgatttctgtatactgttgttcttaataatagctttattgagatataattcatattcaaaacaacttacccatttaaagcatacaatccaatgattttttagtatcttcaaagagttgcctatcaccataaccaattttagaacactttcatcactgtaaaaagaaactccattcctattagcagtcattccttattccaaatccccctgctcgccctagacaactacaaatgtactttccatctctatagatttgcctgttctggaaattttatgtaaatagaacaaagtgttcttttgtgactggcttatttcacttagcattttttttcaaagattcatccctgttgtagcgtgtatcagtgcatcattcttttttatttttttagagacagggccttgctctgttgcccaggttggaatgtgcagtggcatgatcatgggtcactatagctttgaagtcataggcgaaagcggtcctcccacctcagtctcccgagtagctgagactacaggcttgcaccacatgactgtctaatttataattttctttagagacagggtcttgttatgttgtctaggctgctctcaaactccagggctcaagtggtcctcctcccacagcatcctaaagtgctgggattataggtgtgagccacagcacctggcttgcatcattctttttattgttgaataatatcccacttgtaagaatatgtattttatttatcctttccccagttaatagatatttcgattgttcctaattcttgtctattataaataatggtgctatgaacatttgtgtacaagtttttgtgcagacatccattttcctttcttttgggcatatacctacgagtgtaatggatgggccatatagtaactttatgtttaatattttgaggatttttcaaactgttttccaaagtggctgcatcattttaaattccttccaccattgtgtgagtgtttcaatttctccacatatttgcaacacttactattatctactcttaaaaattacagccatcctactgggcatgaagtggtatttcattgtgagttttttttttctttttctttttttctttttttgctaatgtttgtggattttcttttcattttcttgatggtgtcctttgaagcacaaaagtatttaattttgataatttccaatttattttttgttattgctgtttgtgcttctggtgttgtatctaagtgtatgctactttaaaaaattagttgtaatatggcaaattggatacatgtgtaggctttggtgtcacaatcctaattttaaaattctgactctgcccttgacaaattaactaattaagcttccttagcctcagtttctcaactgtaagttggagatattaccaagacctacctcttgaattgttgtggggatcagatgaaataatgtatgtgaaatatttagaattatgcaagtctgtggtaatgaatactaatgttagctatcattattgttataatcccaataataaattctggtgctttgaaaattaaaccaaagccaagcagttgatatgaagaagcatgtaataatgtacagacataatgctttatagacaacattgaatttggctctcatgaacatcaggaatagtggtcatggtagttattatctccagcaggaactgtagctgagagatcttcagagctttttccaaggcgatatcactgggaaataatagagacaaggttacaagctagggctgtgttttcttcttaaaatctttagttcagtttttttcaataacagatttgtagtaggcatcaggtgactggggattcgtattcttcaagttgaaatattaccttgttgagaaagaaaccatgtgtgagacaaccatgttgagaaagaaaaagtgattttatagaaaattaatattgatagtgagcattatatgaaaatcatgaagttagaacatatttggccagaaaatttacattaatagttacccatagcaattaatgcattataattacacataccttttctttaatgaaaaagaattctttccttccaaagttatgcatgctattgttaaacattagagaatatagagaagcaaaaaagaaaatatcttttttgatattttcttaacatacgtctgttcctaataatgtttatagtttagaagcattgcatgaaatgggtagatcaattttctatttaatgtttggattcattaggtacgaagttagcaaattaatttccattagggtgcctgtatggttgtaaatcctggacctgcagaagatttttcagtattggtttgtagtcttttgtttagcagcaaataattagttctccagagcttctgaaattaattgaccactttaatggtgtttacctacctagagaaagaaaaagaacttctccaagtcccttggtaaaattaagcctcatgaacaattaactcaaatatacacaaggcttgtctttagcgagcatatactccctaaagttgattaagctgaccaagtgattactgcttataaattcaccattttatggagaagaagcaaacactgctaaataccttgtggaatcagaggaggggaaattagtaacttgaccccaatactgcgattttaaattgaattcttgaagcctacaagttttacacaggactttagagagctggatagtatcactttgtcaagtcctacttttactatgattctttgagaaaaatacatctgactaaataactctgaatctaaattggataaaataaatgtgacattcaaaatgttatttatgattttagaaaaatatccttatagacactagatgagttttagtctcaaatcaatcctccctatcatagtcacttatcaaaataactaaagcaaagtggtagagctgtgctctagaagtttgggatttatgatcacaatcttttccaatgagtcccctctttcctctgcctgtcttcaacatttgtttttttttttttttggttaggactatccagattgtgtggcctatttcaaactcatggcaaatacattggatgatcagaaattttctaatgtatttgaatttgtctacacaaactagagtaattgctattaattcctcaagtgttaattatttcatgcaaaaaggaaaaaggctattagtctttaagtgtattagtatgtcaatatttgggagaagtgtcatgcaattagtggtttgaatttcctattttattttattgcattttattttatttgcctagtcaaataaaaagtaatgttaaatacatggaagcatgattgttttctacactaaaaatcattttgacttgaaaagatctgatatccatgaccttcatctgaagttttggcagatgaaaatgtcagatgcgtcttttggattaataaaaggcaaaagtcagatcgaaaaatgagtataagctttaattatatgactttaggaggatatgttatgaaaatcaaagctttaatagtgattataattggcaagttctttttttataaggaattacaagtcactctatacaaaaattggaatttttgtcctaagaaatgaaatttactatagtttcatctgtgtgtgtgtgtgtgtgtgtgtgtgtgtgtgtttaaaaaatcaagtgatagggcttttcctcaataaaatctgaaatctcttatagttaagtgaacagaacagtgtatctaggatgctagacttttttttcaaagttagtttaaaacttatacatagtaaaatctgtatgccttagggatctctgtttgctatcccatagtgaatgattaattagtttctgttagaaatagtcagaactaggctgggtgtggtggtggctcatgcctgtaattccaggactttgggaggccaaggcaggaggatctcttaagcccaggaatttgcaaccagcttgggcaggctggtgagatcctatctctacaaaaacaaacaaacaaacaaaggacaataagaaagaaagaaatagccagagctttgaacaaaatttctaagtagaccaatgtaaaagtctgtcgtcaatatgtagtggctatgaatggaggttatgaatgaaagagaaggataagatgaactagaggtgagaggggaagacagcaggcccaagtgaaaggcagagccgagtttattgctttttggttattccaggtgtgtctgctttgtctcatgaaacacctggatgatcactgatttctagtggaagaaatgctgaaaagtccttactgtgcatttaaacattctaggtttaatatactcagggtttttcaaaagaaagggtggctggagttttgcactaactaatatttcataaagtgtctaagtatagatgtctggtttttttttgtatttctaagactggcttgaggtaggcatggagaattctttgatgggacataattttcttcctttctttttttttttttttttttttttttgagacggagttttgctcttgttgcccaggctggagtgcaatggcacaatctcggctcactgcaacctccgcctcccaggttcaagcaattctcccacctcagcctcccgcgtagctgggattacaggcatgtgcccccatgcctggctaattttttttgtatttttagtagagatggggtttctccatgttggtcaggctggtctcgaactccttacctcaggtgatccacccacctcggcctcccaaagtgctgggattacaggcgtgagccaccgcgcctggcctgatgggacatatttttcattcaattttattgatttaacctcacaaaataaaatatttccttaagatgactctgtggtcattgttgggcagcataagcttaatggattttagttatcataatttaccttaaacccaatttgtatttcaggatataaatagaggtttattgtagtgaatcttccaggaaatactaagtgatactaataattatagatggtgaacttaagtctttatattactgaatttgtttggtttgatgatgctaggctatggcattcttgctaatcaaaacgatgtgtcatggtgtaacataacttattaaaatgggcacagataacacaggaagctttttataaaagcagctcacaaattgtgttactttgaactgaactggccatttatgggaaaggtcactgggttgtaaataaggaccaaaagagttacgtttatattttttaaaagagattgaggagatttatttttacatttcttgaaaatgccttattttggtatggtattgacagatagtgaaattctgctcatttgtaaatatagtgtcatattttaataatttcaaacatattgaaaatgcagaatttattaatagtgggagcacattttcctttttactaaatgttctacaggttcttttctttccatccacacacagtgccattaccctcattctaagcctttcaaacatctggcagtaagtgatctgctgcacttagctctttccagctgagctgatttttaaattttcagaaaatttgtgagctaattgttaaacatggccattattaaaaattaaattatttcaacttataattaaataaattatattaaaacaaaagtattaaaaactcaaaagttggctgggcgcactggctcacgtctgtaatcccagcactttgggagaccgaggcaggtggattgcctgaagtcaggggttcgagaccaacctgaccaacatggagaaaccctgtctctactaaaaatataaaaaaatagccgggcatggtggtgcatgcctgtaatcccagctactcaggaggctgaggcaggagaattgcttgaacccaggaggtggaggttgtggtgagctgagattgcgccattgcgctccagcctgggcaacaagagtgaaactctgtctcaaaaaaaaaaaaaaaaaaaaaaaagaaacaaaaaaaaaaaaaaaacaaaaagcaaacaaacaaaaaaacaaaaattatcacttcctaattattttgcattttactattatctatgctattaacgttatttgccttcattgtatttgaaaggtggactatattctattgcactttcattgtactatattctaatatgcaactgtgtatcccttcccaactctgtgttcaatgactttatatttggttgctttaaaatgatgacgatgagagtatttatatcatagaaattggcaaatgccgtaagtcagtttttgtttttgtttttgttttccggagaggggattgttaaatatttgcctgcatgcaacaccactacatgcagtctgctatcttttgttcttcctgctttcaggctcctctcccagctgtctgtctagcacaacccagcataccaaattttcttaaatagggaaagttgaacatggtaaaagaatgaatgaagtcaaaagaatgtggaaagacctaggctttgccatttagtaaagtttagcatctctaagcctccatctctttatcaataaaattgagcaatgatcccttttagttctacccatttaagaagattttcaaatgaaaaccacaacctgctcatgtttatgaaggcactttggaaagcgctaaatacacgggtttttattagtagtaaacacttacttcacctttttcacttcttgactttagtttacaagggctcataatctaaattatatcataaattgctgtcccagatttttttacagcctaattgccacctgtatgttcgactttccttctgttctttatgttagatactgggatagtatgcaccaggtgggtgtgccatcactttctcagatgatgtccactgaagaccttgcatgatcatggcattcattttcctgctgtattcagactggcctcaactattttctttattgctctccaggaaaaattacaaatgaatcagactgggcaatgaagggtaaacctaattatcgctctttgttaaagacagctcttgttaaaatgcggatattgcaaattaatggaaaaaatatgacatagtaaaccatactcacttattaatatcttagtaaggaataattgatgaagttacttaaccttagagccctaattcagttaagttttaatgaaggacaagttgtagagatatcgagaacccagggcaggtgcctactgaagaagttccagaccaaggaagtataaagaaggacctgggtgggagcagtgagattggatatgagggccactggcaaagttttgccccagaacagtgtcaaaatgtttgcatttggcatagccctttctctttttgttctgaatggctttgctagaatatcttttctataatgaatttatcctgcttctcagatattgctaaagcactcccttttgaattttggtgctttaacatgcattttgatacattaccaaataaggtctgaatgacacaaattttagaactctccagagaaaagaaagatgctgagggaaaaagcataggtttgggactcactaaatcccagttcaattcctttctttaataaatatattcaattttacctgagaaagctctcgtgctctcgaattttatttagaaatttctctttgtacatgattgatttcacaatccttcttctgcctcctcttctactttcttctttctagattttcctatctttatgaagattattctgccttatcctcaacagttagaaacaatatttttgaaaatcactacggtatcctgcatagtgatttcccatgccaactttactaatttccattataaattattatttattgatgcctagagggcagatgagtgtagctgctatggagtgaggagacaaaacataagaaagttatgatcctaccctcaggtaatgattcagacatgataattaagtcaacaaattgatagaaactaatcactaactctctggctatagtcattctttcaatgaatagctcattactgagtatgcatgctacagtaacaaaattatataaggctgttgattaaatgttgattaagtgcatgtcttattcagagtttttttatatttgaaatggaagaggctggacttcagtaatttgctataaactgctagtatatgattatttgggggcagttattttttaaagaataatttaaatatggaatgtttagcagtttgttttttccctgggaaaaaccatactattattccctcccaatccctttgacaaagtgacagtcacattagttcagagatattgatgttttatacaggtgtagcctgtaagagatgaagcctggtatttatagaaattgacttattttattctcatatttacatgtgcataattttccatatgccagaaaagttgaatagtatcagattccaaatctgtatggagaccaaatcaagtgaatatctgttcctcctctctttattttagctggaccagaccaattttgaggaaaggatacagacagcgcctggaattgtcagacatataccaaatcccttctgttgattctgctgacaatctatctgaaaaattggaaaggtatgttcatgtacattgtttagttgaagagagaaattcatattattaattatttagagaagagaaagcaaacatattataagtttaattcttatatttaaaaataggagccaagtatggtggctaatgcctgtaatcccaactatttgggaggccaagatgagaggattgcttgagaccaggagtttgataccagcctgggcaacatagcaagatgttatctctacacaaaataaaaaagttagctgggaatggtagtgcatgcttgtattcccagctactcaggaggctgaagcaggagggttacttgagcccaggagtttgaggttgcagtgagctatgattgtgccactgcactccagcttgggtgacacagcaaaaccctctctctctaaaaaaaaaaaaaaaaaggaacatctcattttcacactgaaatgttgactgaaatcattaaacaataaaatcataaaagaaaaataatcagtttcctaagaaatgattttttttcctgaaaaatacacatttggtttcagagaatttgtcttattagagaccatgagatggattttgtgaaaactaaagtaacaccattatgaagtaaatcgtgtatatttgctttcaaaacctttatatttgaatacaaatgtactccctgggaagtcttaaggtaatggctactggttatcaaacaaatgtaaaaattgtatatttttgagtacctgttacatgccaggtagaatatctcctctcagccactctgagtggaaagcatcattatctctattttacagaaaagcaaactgaggctcagagagataatatactttgccagttaatgaatgatggagccatgattccagctgaggtctgtattgccttgctctctaggaatggtagtcccccccataaagaatctctcagtttcctttccaatcaaaaggttaggatccttttgattgccagtgacagaaacccaatttactagcttaagtaaataaaaggaacgaatttattggctcatgaagcctgaactatgtgaagacctaggtggagaactggccttaggaactcaatgggaccaaggactcaaatgccacctggtggcatttgccttatgctggttttattttctcagaccggaccagctttctacataaagtgggtccctggttagaactctttgctcctatctttaaggaccacgaaagaaggagccctttgtccttggctaaatgtgaaaaatcccagagactcttgagtcatagtgcttaccccttgggccactcatagtctagaatgaactaggctgagtctcgtgccaacagcacaggcctgatgccagataaaagggtgagtgaagggggataaaaaataagacatagctactaaattattgcaccaaagtaaaaacattgagttgacttgcaatttgtttcttttaattaaattcatttcctttttttggcattttgaaggcaaagtaagatattaaactttatttttattgattttattcaaagaattaagctagtgggagtagcagattcacacttctaagatcaagggccagcttctattattgaacacttggtgtgtgcaaatgccatgaggtagggatactttgttttgttttttattttttattgggttcgatctcttttgtttatgatgtatccccaagtgcctagaatagggcctggcatatggtatatactcaataaatatttgttgaatgaatccatgatggaatgtgaaatggctagcattacatagaaacctgtagcattgctggagagataaaatatataaacataatccattgcaggtatattgacaagttcaaaataatataatgggtattgaatatctaaatgtttgttgttgttgttgctgttgtttttgagacagagtcttgctctgttgcccaggctggagtgtaatggtgcaattttggctcactgcaaacttcgtctcctgggttcaagtgattctcctgcctcagcctctcgagtagctgggtttacaggcactcgccacaatgcctggctaatttttgtattttagtagatgtggagtttcgccatgttggccaggctggtcttgaactcctgacctcaagtgatctgcccaccttggcctcccaaaatgctgggattataggtgtgagccactatgcccagctttgaatatctaagttttaattggatgctgagggaatgattaatcagagtagggctgggttaattgaaaaatgtgatacatttgtatttatggccagatagagaacatgaatctgaatttgcagaattatctggcttaacatttttttctttccagttttcactgtatcccccatgttgattcaatttaaaaaatatacctattttacttcaattcaacaatgctatgccagtacaaacccatacgttctattatttttgttttgttttgtttttgtatctccaccctgttacttcttttcttataaaattggtatttgaaatttattgaaatattttggaagagtgacataccatttttggtactttgtacctctgcacccttgggaagtgaccctggcttcacatttcataactgccttgtgaccatggccctcaagtggttgccagatggttgaagaacattaacctatctggctcaattttgtgaccatggattgaatcctctacataactgcagtgtgcaaaccacacatccgttccaagattgtagtcaggatatgaactttttaagaataaaacttcttcccttctgatctgggcctggtatgtggtcctactagaaccacatcacctactcttggtgctaacaatttgtggcaccaagttgttcaagtttcacccattaaagaaattccccgaccttgccttctcctcaggtaactaccccattctattttttctttcatagctaacattctctgctctcctggtctctctacttcactttcatttacatctcagctcctgaagtatggtttccaccatgttcctaaaactacattgcccagggtcactagagacctcttatgaaatataacaacacctttctacattacttccgtgtggaccactttttcacattgaacccattttgttggtttatgtacacaccccttccttggctttcccatctgatccatttctcctttgatggagaaggtgagtctgctccatatttagcttcttactctgagtaaccaaatgttatggatgggaggttagctctgtgtgtgagagaaaggtggagaagcatgtggggagggaaatagatgggaaaaggtaattaggctttatagaagggctctcattagcaagcttctaggggatgccaagatccatgcttagagattgccaggcttgtcttcaaatctcagctgtgtattactcctttatgttttttgtttgtttgtgttgtttgtttttgagacagagtctcgctgtgtcacccaggctggagtgtagtggtgtgatctcagctcactgcaaactctgcctcctgggttcaagcgaatctcagtctcctgagtagctgggactacaggcatgcaccaccaggcctggctaatttttgtagagacggggttttgctatgctggccaggctggtcttgaactcctgacctcaagtgatctgcccgccttggcctcccaaagtgttgggattagtggcgtgagccactgccccggcctattactcctttagagtgatttagagccatgtttacttatggtaacttgacagtaatgggaataaccactgatgaaacgtaaagcctttgtctaattgtttacctagttcttccttgtggttcatgaaatttttcatctctgtacagtttgaaaattaagatgataatatttagagatattttattcctttgtgaagagaaaaaaggctttcattaacagaaatcagtggcaataacttaataaatacaatcagctggtgttcctatagtatttaaaagaaaacagaaagtttactagatttcagccagttttcagactatttaatgtctattcttactataatagaaaatatataatttgatcttgttctcatttttcaaagacctttaatacatgattttagtagttgaaaatgaagtttaatgatagtttatgcctctacttttaaaaacaaagtctaacagatttttctcatgttaaatcacagaaaaagccacctgacattttaacttgtttttgatttgacagtgaaatcttataaatctgccacagttctaaaccaataaagatcaaggtataagggaaaaatgtagaatgtttgtgtgtttattttttccaccttgttctaagcacagcaatgagcattcgtaaaagccttactttatttgtccacccttttcattgttttttagaagcccaacacttttctttaacacatacaatgtggccttttcatgaaatcaattccctgcacagtgatatatggcagagcattgaattctgccaaatatctggctgagtgtttggtgttgtatggtctccatgagattttgtctctataatacttgggttaatctccttggatatacttgtgtgaatcaaactatgttaagggaaataggacaactaaaatatttgcacatgcaacttattggtcccactttttattcttttgcagagaatgggatagagagctggcttcaaagaaaaatcctaaactcattaatgcccttcggcgatgttttttctggagatttatgttctatggaatctttttatatttaggggtaaggatctcatttgtacattcattatgtatcacataactatattcatttttgtgattatgaaaagactacgaaatctggtgaataggtgtaaaaatataaaggatgaatccaactccaaacactaagaaaccacctaaaactctagtaaggataagtaaaaatcctttggaactaaaatgtcctggaacacgggtggcaatttacaatctcaatgggctcagcaaaataaattgcttgcttaaaaaattattttctgttatgattccaaatcacattatcttactagtacatgagattactggtgcctttattttgctgtattcaacaggagagtgtcaggagacaatgtcagcagaattaggtcaaatgcagctaattacatatatgaatgtttgtaatattttgaaatcatatctgcatggtgaattgtttcaaagaaaaacactaaaaatttaaagtatagcagctttaaatactaaataaataatactaaaaatttaaagttctcttgcaatatattttcttaatatcttacatctcatcagtgtgaaaagttgcacacctgaaaatccaggctttgtggtgtttaagtgccttgtatgttccccagttgctgtccaatgtgactctgatttattattttctacatcatgaaagcattatttgaatccttggttgtaacctataaaaggagacagattcaagacttgtttaatcttcttgttaaagctgtgcacaatatttgctttggggcgtttacttatcatatggattgacttgtgtttatattggtctttatgcctcagggagttaaacagtgtctcccagagaaatgccatttgtgttacattgcttgaaaaatttcagttcatacacccccatgaaaaatacatttaaaacttatcttaacaaagatgagtacacttaggcccagaatgttctctaatgctcttgataatttcctagaagaaatttttctgacttttgaaataatagatccataatatatattcttatggaaatctgaaaccatttgggcatttgggggtaaaaagtattttattagtaaatttaaatgaggtagctggataattaaattacttttaagttacctttgagatgatttttctcaatcagagcaccacccagagctttgagaaacaattttattcacagcttctgattctatttgatgtaatttttagaaaataagttttgctggttgctttgaatcagggtatggagtacagttcactctgatcctatcatataaatcatgtaagtatataacattttcaataagtgattgttggattgaagtgaatgatatttcaagtaattgttatgtcatggccaagatttcagtgaaactcaaaatttctcctggttgtgttctccattgcatgctgcttctattgattaacctaagcactactgagtagaagctggaagaggggtctaattagaaggcccctttctatgctctgcttggcttgtaaaataatttatttctctagatcccaccaacatagtagtttcatgtatgcaaaaacacccacctaaatgtcaaagtttgtatgatacatggacatatctatagaattttttttggtctggtgcatgccaaaaaataaacatgatatagaagaatttaatatttattgagtacctaatctgttccagttcaatatgaaggtctttatgcagattattttacttaattttcctagtaactccatggagcaaaaattatctctaatttatataacaggaagttgagcgtgaggcaaattaagtaactttcccaaagttacacatatggtaagtttgagagatatcccagtctctttagctccaaagcctttgaccctttcaccataccagattatgattgctattaatatataattataattataatgattgtatttaggtactcaacagaatggtgactctagtaaccagccttggttctgctgagcttctctgcgtcttctcaggagacacaggctacagagcttgaaggctgaggattcttccagggtcacttcaggggcaaatctgaaactttcttcaggacaggaatcaacgagatcttctcacttacttatacctgggggaggaactgtatgaaatccacccaagaaccagtcatgctaagggccaaacctatagacaaaaaaagggataggagaatggagtatgtatggagaaagactaaattgttcttaaacttctcaagcttaaaaatatcccagcaaaagagatcgtaaaagcccttcatggcgtattaattatccatgcatgggggtgagtggaaaggtactcctgagcccgaggctacagctttggaactagcagcacctttgaaggggaaagcgtgtttccatcatctcaactcctactgataaccaatggaatattggtgagtaaaggatcctgggggaagaagcagctgaaatgtgtaggtgagaaggcagagagaagaatatttatattgggaatggcacaagtgtgatgaggctgcaggtttttcacccttgtcatagagaaaaaaccacgctgacaccatgcagttttaaatagtgagaaatttgcaaattgttagatcttaaataatttagataaacatagtggccatttagattattgcagttttttcaggatatctgatctcttgatttcattctttttgtctcttataagaataaaagggggggagaaaatttagccattatagtatttctctacattttctctgtccttttacataacttacaccagtgccttcctatttatggtattatttatgggtatttcttcttttctttcactgagcaaggataaatgagccagggattcttgaaactactgtaacacttctcttagaaatagatggtcatactttcagaatctctacacattcttagtccctctaaacaatgatagttgtggcataaaaatatttgcttggtttcaggactgatagagaaaagtactataaaatttgctgttaactgtgaaaggttaaaaaaaaggaggtgccatcatgaaggagctaatctttctgaagtactgctgtagttttaaatattattagctatgacttctcaccattaactatgcacttgctttttcttcatctgactcagcagccagatagatgcaacattgtctttaacatttaagactcctagcaagtccgggcacgggggctcacacctgtaatcccagcactttgggaggccgaggtgggcaaatcacaaggtcaggagtttgagaccagcctggccaatatggtgaaaccctgtctctactaaaagtacaaaaatcagccaggtgtggtggcgtggtggcgggcacctgtggtcccagctacttgggaggctgaggcaggagaatagcttgaacctgggaggcagaggttgcagtgagctgagatcgcaccactgcactccagcctgggtgacagagcgagactccatctcaaaaaaaaaaaaaaaaaaaaagactcctagcatggaagagaaactggctgttgaaaacctgaatgtgagagtcagtcaaggatagtttgagggaagccaagtagaggaagctctcacaagcagattggtgagagaatatgattatacaatgcatttattatgataagaaattcacaagcattcattcaaaatactcttgattcctaggcagctctgggcatatttccaccaacaaattgaggcatatgtcagtgcagcctaggtcagactaccttttttcattaaacctcacaaaattaaaggacatacaggagaagtcctggtactcatgttgcagactacagtctatatggcaaaggaggatctctgtcccttatgtttggatgaaaacattgggtaggcatttgaatacaagcctactgctaatatggggctaaggtctttggccccctaaaggtttgctgaaatattactgacaggaggcagattgataagaggaaaagcacataaatgtatttgacatgtatacatgggagccttcaggatgaagacctaccctctcagtgcagtatggaagcttgtataccatcttgaggttacagaaagaatgggggtttggatctttgtaaaacaggtttcagtggcaagacaggttatgagaaggagaaaggaagagacttgggtagcaaagggggtcttgttttgtaggtaaatcgttggcagcccacagagaaaatagatggagaatgtttcttttcagaccttggcaggtgtcagattctcagttaatctctcctagatttgaaaaaaaaaaaaaaggtctagaaagggagagcctggctgcactaacacattttctacagatgcaaatttctcccacaaaatacagctttgcaggtccacttctatctgctgggcctgtggcaaccatttcaaaatatgtgaatgaaatatatgtgggggtaaactatttttatttacttccctaaagaagggatggtgttctctcgggaattctgtgcatagagagcctgtggcttaggcactttgatttatgtatatctcttcctgtgattggctatctagggactgctatctccagcaaatcttctaaatgtctgccatgtagaattcctttctcatctttctgtctcacccccttatctagctgcttctctaaccctagagtgacactgcactccccacaatctcctatgtcctgaatattttaccccatcctaaactccatctctaacacagatgcactttcttgtgctgcctactgcattgtacatcttccccttagttcccatgatgcaactctgccctaccccagaaaatgtaatttaattggtctgggataaaacctgggacactatcattcttgaaatattccccaagcgattctaattatatagccaaagttgagaactatttgtagacaggcatcagcatgatcacttaatgatttgacttttgctagatctaaggtgaggaaattggagagtggtatccataggaagaactgtttagtttaattttttttttattttttcttctaaaaaaaaatccaacaacgagatacatgtgcggaacatgcaggtttgttacataggtataatgtgccatggtagtttgttgcacctattgacccatcctctaagttccctcccctactccttacttcccaacaggccctggtgtatgttgttcccctctctgggtccacctgttctcaatgttcaactcccttttacgagtgagaacacatggtgtttgattttctgttcctgtgttaatttgctgaggatgatagtttccagcttcatccacgtccctgcaaaggacatgatctcattcctttttatggctgcatagtattccatgatgtatatgtaccacattttctttatccagtctgtcattgatgggcatttgggttggttccatgtctttgctattgtaaatagttctgcagtaaacatatatgtccatgtgtctttatagtagaatgatttatattactttgggtatatacccagtaatgagattgctgggtcaaatggcatttctggttctagatacttgaggaatcgccacactgtcttccacaatggttgaactaatttacactcccactaacagtgtaaaagcgttcctatttctccacagcctcaccagcatctattgtttcctaacattttaataactgctattctgactggcatgagatggtatctcattgtggttttgatttgcatttatctgatgatcagtgatgctgagatttttaaaatatgtttgttggccatgtaaatgtcttttgtgaagtgtctgttcatatcctttgcccaccttaatagggttttttttttcttgtgaatttgtttaagtgccttgtaaattctggaaattagatctttgtcagatggatagattgcaaaaattttctcccattttgtaggttgcctgttcactctgatgataggttcttttgctgtgcagaagctctttagtttaattagatccaatttgtcaattttggctttttttgcaattgcttttggcattttcctcgtgaagtctttgcccgtgcctatgtcctgaatggtattgcgtaggttttcttctagggtttttatagttttgggttttacatttaagtctttaatacatcttgagttaatttttgtataaggtataaggaaggggtccagtttcagttttatgcataatggctaggcagttttcccaccaccatttactgaataggagatcttttcctcattgcttgtttttgtcagatttgtcgaagatcagatggttgtagatgtgtggtgttatttctgaggtctctgttctgcaccattggtctatatgtctgttatcgtaccagtcccatgctgttttggttaccgtagccttgtagtatattttgaagtctggtagcgtgatgcctccagctttgttctttttgcttaggattgtcttggctatatggagtcttctttgattccatatgaaatttaaaataatttttttttattctgtgaagaatgtcaatggtagtttgatgggaatagcattgaaattataaattactttgggcagtatagccatgttcacaatattgattctttctatccgtaaggacgacactttttccatttgtttgtgttctctcttatttccttgagcagtggtttgtagttctccttaaagaggtctttcacatcctttgttagctgtgttcctaggtattttgttctctttgtagtgattgtgaatgggaattcattcttgatttgcctctctgctgcctgttgttggtgtaaacaaaattcatttcttgttcttatttgtgaaattttggaaccaaatctattttcaaattagaaattgcttgtgataatggttttgcaacttagactggatatgagacgatgagatattagttctttcattcctttgtaggaatatggtgcatcttgcattattttagctaactagtgtcctttaatgactaatgaatatgacatggtgaaacaaagtaaaatatatatgatgcactaagtatgcattgtttccaaaggttcagcattttttttttgttaactctgctgggatctgctttatgcactgataacataacttattttatgatcttaagcaaataaaaacacttatctggacctcagtttccttaactgtacaactgagggaaactgtatagtatagctatagtacagtataccatctttaccgtcacttccatcttttaaattatgtgtatataagatagggcctagataaatggtatttatcttaaattacagtgatactagcttataacttaatttgctaggtcatgttgaactgataacaatgtgtgaactgatgagcaactgagaagtaaccaggttgtgttataacagtttgtttttgatttagggttatcagtgagggtggcggtggggaggggactttggagtctaactgtctagttcaaatattagtttttgtttatttttatttttaatttttgtgggtacatagtagatgtatatatttatggggtacatgtgatgttttcatataggcatgcaatgtgaaataagcacatcatagagaatggggtatccatcccctcaaacacttatcttttgagttaccaacaatccaatgacactctttaagttatcaaatcacagttttgccagctactagccatgtgattttgggtaggttacttaaattctcttcatctcaatttcattattgtaaagtggagataatgatagcacattttttctttttcttttttcttttattttttattattatactttaagttgtgtgatacatgtgcagaatgtgcaggtttgttacataggtatcaacaactctataaaacatgttctatccaggaaaagaaactatcatcagagtgaacaggcaacttacggaatgggagaaaatgtttgcaatctagatggcgattgcaatggcggttcgctgcatccatcagcccatcatctacattaggtatttctcctaatgctatccctccccttgctccccaccccctcacaggcccctgtgtgtgatgttcccctccctgtgtccatgtgttctcattgttcaactcccacttatgagtgagaacatgtggtgtttggttttctgttcttgtgttagtttgctgagaatgatggtttccagcttcatccatgttcctgcaaggacatgaactcatccttttttatggctgtatagtattccatggtatatatgtgccacattttctttatccagtctatcattggtggacatttgggttggttccaagtctttgctattgtgaacgctgcagcaatgaacatacataagcatatgtctttctagtcaaataagttataatcctttgggtatgtacccagtaatgggattgctgggtcaaatggtatttctggttctagattcttgaggaatcgccacactgtcttccacaatggttgaattaatttacactcccaccaacagtgtagaagcattcctatttctccacatccgctccagcatctgttgtttcctgactttttaatgatcaccattctaactggtgtgagatggtatctcattgtggttttgatttgcatttctctaatgactagtgatgatgagcttcttttcatgtttgttggctgcataaatgtcttcttttgagaagtgtctgttcatatcctttccccactttttgatggggttgtttttttcctgtaaatttgtttaagttccttgtagattttggatattagccctttgtcaggtggatagattgcaaacattttctcccattctgtaagttgcctgttcactctgatgatagtttcttttgctggatagaacatgttttatagagttgttgtgagaattaaatgcattaagcacatagaatagattctggtacatagcaagtgctctctctatatatggaactctatatgtagttggtgcaaaagtaattgtggttttcaccattgaaagtaatggcaaagaccatcattaccttttcaccaatttaaatatatggaaggaatatatatataaaacctatatatatatgtcacatatatgtctctaacccattattataatatataatacaatatatattataattataattgtatataacatatgttatataataatatagtaatatttattctaaataaatatataatactataaataatataataatttatatatatgattataatatataataggctatattatatattattaacatatacatatgtgtatatatatgtctttcatagacttaaatatatagagcaataataggttagaaaatagcaaacatgtatatataaacatatatacatatagaaaacatatataaaaacatatatatatatatatatatgtgtgttttctgcctttcatttttagagacagggtctcatcatgttgcccaggctggtctcaaactcctgggctcaagtgatcctactgctttggactcccgaagtgctgggatttcagacatgagacactgcacccagtccagtccctgtctttttaaatagactctctacctaagtgcacaaatactcattatttacatttagttatttctgtatatatgctataagcaaatcttgtagcaccagtttgatttttataaggcacaagaatatattttactaatgctttaaaatggcagctagattctagtattactttagaaattaaaattaatattttaacacatctttcattattgtgttatctgaaccaaacctattattgctgctatttcagcaaatccaggggctttttcttataaaatatgaagaatatagcttagatttctagtgaagatgttaccagtaataattaataaaatcagtaagcactaaaaggaaaataccaaaactaaagcattttgaattagtcattgaatctaaaagaaaggtagatttttttctgagattctgttctaggtgtggtatatgtgtatttttgcaaaaactataaacaattgtggcaaaatgaaggaaatatttaaaaacaaacctcttaattcttcagtggattaagcgtgaatatgtttttattttctatgatgaatatggaaaaattcatttccttagcaatttgtatgagcccaaaaactattgtcagactctgctgtatcaaaatagacaaaaaattgacactcacttttaccctgccaaaagcaaaatcttaaacttttgctttagtatataagccagcattcattgtatcctatgatgggttctgagtgtaggtgtatttgctttcttccattttttgtatgcatgttttctttttatttattattgtaagttgtatgaaatttttatccaaatttttattttcttctgattaataatcagaataatcagataattactggtaaatttgatgttaatccttccagctttttcccatgggaatttatacttaataaaggggagaagtcatcattacataatgtgcatattaatctgcttctccctttaatgtgttgtgaatgcctttccatgtcattagatgtttttctacctagttactttcatgaatcatatggctgtaccatgatttatttaatcagttcctcatcattgagtatgtaaattgcctccatttttttattactataaaaggtccttcagtacacacccctttaaaagctgactcttagaaggtgttcttgactctctacctaagtgtaaaaatacaaataaattgctttccagaaaaggtgcactactattttactttcctgatactaaactatgaaaattcagtcctaacaatagatatttaaataaagttttaaaaatgccaagtgaaaaagagcatattattattttcatttgcattacttttggttcctggtgagtttaatctgtttttgtatattaattatgcatttatatttctttttgtgtgtgtgaattgcctttcatgttctttgtgtgtttttattttgttgtatttgtctctttcttgatatatgagagaatattttccctagcctgtcaattgccttgtaattttgtttctagtgagtttttttttttttttttacaattaaaagctttaatttttgaaaattttgctggcaaatctatataactttttctttgttttctgctttgacattattcttttataaaggcccatgccacccaaatattatgtaagcatgcatctatgtttttattacttcatcttttacatttaaatatctactctatttagaattcattgtgatgcatgtatgaggtagaaatctaatttcaaaaagatgagtatccagtttgtccatcatttattgcatgatctctttctccactgaattaaaatgccgtattttataatatattaaagtattacatgtgcttggacatgttcctggacttttgagataaatcagtctatttctttgtcatgtcacatattattatggctttatgatttaatatccagtaatgtaaaccctctgacacattattcttattcctcaaatgtttttgatgagttttcttccaaatgaaatttataatcattttattcattgattcaacaaatatttgttgaatggatattctgtgcttggtattgtgcatggtattaggattgttgcaaaaattgagactgacagtccctactcttacggtgctaaaaattcacttccaaaaaaatctttaaatgttgatgaagattgcactaatcttataaaataacttggaggggaatgtaatctttgcaacattaagttcttcattttagaaagttttaagactctccatttatttgagacttttaaaatatgtcccaataatgttttgtgagatgtatattttaagatatatatcttattgctattacattgtatcttttgttatattgttactatgaatgggatactcatttaattagatgtcatttttggtatatagaaatctattttcttagcatagtcattttttaaacctcgatctattaaattcttgattcatttacatttgttacacaatcatattctatgctgataatacttcttgcttctttccaatatttgtacctcgatcatttttcttgttgagttgtattagctagaagttctagaaaaatgttaaatggtagtaatagctagtattctgttttttcctgactctaaatgtaatgcatctagacttttataattatggcattgattgtaacattttgaggaagaaatcctttttcaggttaataatgtatctttatattcaagtttattaagaacatttattggaaacatattgaaattttatcagattccttttcagttgttactgagataatcataggttcttctgtattcttttaattaatttctcaaaattaaactgtcctattattcttggaataacgacatataaagtactgtatatttaaaagaagttaaaatgataatggtgattttattaagtgacctcacacaatagaaaacagtgtagccttagaagttttccaagtgaccattctacttagaaacaaccctgctttgggatcagaactgtaatttttaaagtaaagttttctgggtttaattcatttagtgtaattacaagcatgagttcaggtttctatttttttcacctgaactttccttcatggtttgaatatctagaaaaagcagactttcctatctctagactaaacatttgatcctatcttaggtatgcattacaattttttaaccataaatggttaaagaatttagactcatctacaataactttgaagctctggtcttgaagaacatgtgagaaatgagatataactcctagaagatataggagacatttttagtcttccaaattttccctgggaggctgatctaaattgagtcacaaaattgttcccaccaggaatgcaatcacttgagctgttttctaatctgagcccctctacccagatgatcttctgaactcatactgttcagactttcatccttctgagtagaaaacagccatagtcatggcaggatgagggctaggacaattacccaaggaattcttggcctctgccatgggactctgcagactcagatcatataatcagagatgttagcactggaggggacatcacaattagctttctccacctcttagtttatcagtgaggaaaactgtccagagcgcggaagagactaaaataacacagccaatgtaggtaatgtgctggataagaatttggaattcacgattttgaattcagtgtttatttcaccatcacgctggcttacacgttggtatcaggcttcttctattattgaagtgagccattaagtgaattccatcttgatttgtgtctgatacagagtaataaactattttattaaatatccaaataattatacattcctccttcttacatgcaagcctaagtttgcttgtactatttcatgtggtagcaaatcaggacgcttcttgtgtctctgaaaatactctgagtaatggagtacagtcagctttcttgtaccaagaatatagggactatgtttctcccagtcattctggggataatttttgtgaaggattgcacttcataggttaagctaggtatcagttaccagtgttttttccaaataaaaaaaaaatcaggtgatatctgtaaatggttccattgtaaatattaaagaacatgatgcttaaaacagattagggaaaactatagaaggggtggggtttcggagtgctaattttgtccttgaatggtaacagctccatgtggtggtgaggtttatgttggtttgctgtttgcagatgatcttattattagaatttttcataccgaaaataaactgcattttagtttgtaaacatgcccttccagagtaatgctaccagttctttgtgaaatagctactgttgttcaaaggatgactatgtcctcttcggttgaggaaagatgacaacaaactcagtaatgacatgtaaaataggtattacaaaccaggtatggtggcatgagcctgtaatcccagctacttgagaggctaaagcaggaggatctgttgatctatggatttgaggctgtagtgtgttgtgatggcacctatgaatagcccttgcactccagcccaagcaacaaagcaagactgtctctgaatttttgttttgttttgttttttgtttttttttttttgagacagagtcttgctctgtcacccaggctgaagtgcagtggcgcgatctccactcactgcaagctccgcctcctgggttcacgccattctcctgcctcagcctcccgagtagctaggactacaggcgcccgcctccacgcccagctaaattttttgtatttttagtagagacgaggtttcactgtgttagccaggacggtcttgatctcctgaccttgtgatcctcctgcctcggcctcccaaagtgctgggattacaggcgtgagccaccgcgcccggcccctgtctctgaattttttaaaaaggcattccactcaaattaatacacattttaattgtgttttgttgtaaattacaactgaataaaaattcagcaaataagtctgttgtggtagggaaaagtctattgtgatctggaaaatataatggagaaatccagtggaagagattttatttcacattactcaaaataaaaaaatcttatacaagtctttacacttgtaacttgaaaaattctgtgctaaaatttagcttggttgctaaaatatttctctttttttctcagaagcttctttttagcatcctatagacacaagttactttttaaaatatttgcatacttgctttgcaatgtattgtttatcagtagttctatattctttgagatagtctatccagtctttctgtatttatcgtatgtctgtatagatatatattagcagataaatgagttctgaaaggggagaaatgtgattatgctaatcatgatataaagaattgactttataagcagtgttcacaggtcatacctttcccgttactgtcttacagtgaacaagaaatgatgctttgtctggtatgcatggtaaataatgccccttgctctctgcttcatgatcacatgtgatacttctaacatagatagcacatgtaaatccagtggccttgactgcaactcaagagagcattttggccaagtacaaacccactagtcatgaaaaaaaaaaaaaaaccaaatcaaagtaaattgatggtattgacatttgtctatgaaaaacaacataatatagaacaattctggggtaaaatattgatctaaaataattttaaggattaaatattgccattgtaagcatactatgagcaattatgtttgtaatgcagatatatttataattttaaatccaagatttaccttaattgtacattttcctaatttaaaaaagttattttgaaaaaaaaatcctcgaatctagagaaaggttggcaaatacatatggaactttgtaaaaaacatccagggcagcactttcactgattgcagtagcttaggagtgaaaaacaacacaactgctccaatgtatggcaatgggcaaatatcccgatttattcacagggtggcatgttaggcagtgcttagaataaatgagttggttatacaagtatcaatagggataaatgtgaaaaacacagtgttaagtttttaaaaagttgtaaaaagcacagtaggatgttatttatataaaatttaaaaacctcaaaaaccattcttctttgatatatattctaaagatgaacatatatgtaatagaagtacaaaacatacataaaataatatacactatgcagtcatttgtgtacttacttttcaaaaatatttcagtagatatagcaaacagttaacatgtaatatttggataggaggttggcaattttctttttagcacctgcctgtctgctatcattcaaactcacatttaaaatgtggctatgtgagatgagagaactataatattccaggtttgtgattagtttggaaactttttaaaagtttgaatgtggtctgagagatagtttgttataatttctgttcttttacatttgctgaggagagctttacttccaactatgtggtcaattttggaataggtgtggtgtggtgctgaaaaaaatgtatattctgttgatttggggtggagagttctgtagatgtctattaggtctgcttggtgcagagctgagttcaattcctgggtatccttgttgactttctgtctcgttgatctgtctaatgttgacagtggggtgttaaagtctcccattattaatgtgtgggagtctaagtctctttgtaggtcactcaggacttgctttatgaatctgggtgctcctgtattgggtgcataaatatttaggatagttagctcctcttgttgaattgatccctttaccattatgtaatggccttctttgtctcttttgatctttgttggtttaaagtctgttttatcagagactaggattgcaacccctgcctttttttgttttccattggcttggtagatcttcctccatccttttattttgagcctatgtgtgtctctgcacgtgagatgggtttcctgaatacagcacactgatgggtcttgactctttatccaatttgccagtctgtgtcttttaattggagcatttagtccatttatatttaaagttaatattgttatgtgtgaatttgatcctgtcattatgatgttagctggtgattttgctcattagttgatgcagtttcttcctagtctcgatggtctttacattttggcatgattttgcagtggctggtactggttgttcctttccaggtttagcgcttccttcaggagctcttttagggcaggcctggtggtgacaaaatctctcagcatttgcttgtctataaagtattttatttctccttcacttatgaagcttagtttggctggatatctctcagaccacagtgcaatcaaactagaactcaggattaagaatctcactcaaagccgctcaactacatggaaactgaacaacctgctcctgaatgactactgggtacataacgaaatgaagacagaaataaagatgttctttgaaaccaacgagaacaaagacaccacataccagaatctctgggatgcattcaaagcagtgtgtagagggaaatttatagcactaaatgcctacaagagaaagcaggaaagatccaaaattgacaccctaacatcacaattaaaagaactagaaaagcaagagcaaacacattcaaaagctagcagaaggcaagaaataactaaaatcagagcagaactgaaggaaatagagacacaaaaaacccttcaaaaaatcaatgaatccaggagctggttttttgaaaggatcaacaaaattgatagaccgctagcaagactaataaagaaaaaaagagagaagaatcaaatagacacaataaaaaatgataaaggggatatcaccaccaatcccacagaaatacaaactaccatcagagaatactacaaacacttctacgcaaataaactagaaaatctagaagaaatggatacattcctcgacacatacactctcccaagactaaaccaggaagaagttgaatctctgaatagaccaataacaggctctgaaattgtggcaataatcaatagtttaccaaccaaaaagagtccaggaccagatggattcacagccgaattctaccagaggtacaaggaggaactggtaccattccttctgaaactattccaatcaatagaaaaagagggaatcctccctaactcattttatgaggccagcatcattctgataccaaagccgggcagagacacaaccaaaaaagagaattttagaccaatatccttgatgaacattgatgcaaaaatcctcaataaaatactggcaaaccgaatccagcagcacatcaaaaagcttatccaccatgatcaagtgggcttcatccctgggatgcaaggctggttcaatatacgcaaatcaataaatgtaatccagcatataaacagagccaaagacaaaaaccacatgattatctcaatagatgcagaaaaagcctttgacaaaattcaacaacccttcatgctaaaaactctcaataaattaggtattgatgggacgtatttcaaaataataagagctatctatgacaaacccacagccaatatcatactgaatgggcaaaaactggaagcattccctttgaaaactggcacaagacagggatgccctctctcaccgctcctattcaacatagtgttggaagttctggccagggcaatcaggcaggagaaggaaataaagggtattcaattaggaaaagaggaagtcaaattgtccctgtttgcagacgacatgattgtttatctagaaaaccccatcgtctcagcccaaaatctccttaagctgataagcaacttcagcaaagtctcaggatacaaaatcaatgtacaaaaatcacaagcattcttatacaccaacaacagacaaacagagagccaaatcatgagtgaactcccattcacaattgcttcaaagagaataaaatacctaggaatccaacttacaagggatgtgaaggacctcttcaaggagaactacaaaccactgctcaaggaaataaaagaggacacaaacaaatggaagaacattccatgctcatgggtaggaagaatcaatatcgtgaaaatggccatactgcccaaggtaatttacagattcaatgccatccccatcaagctaccaatgactttcttcatagaattggaaaaaactactttaaagttcatatggaaccaaaaaagagcccgcatcgccaagtcaatcgtaagccaaaagaacaaagctggaggcatcacgctacctgacttcaaactatactacaaggctacagtaaccaaaacagcatggtactggtaccaaaacagagatatagatcaatggaacagaacagagccctcagaaataacgccgcatatctacaactatctgatctttgacaaacctgagaaaaacaagcaatggggaaaggattccctatttaataaatggtgctgggaaaactggctagccatatgtagaaagctgaaactggatcccttccttacaccttatacaaaaatcaattcaagatggattaaagatttaaacgttagacctaaaaccataaaaaccctagaagaaaacctaggtattaccattcaggacataggcgtgggcaaggacttcatgtccaaaacaccaaaagcaatggcaacaaaagccaaaattgacaaatgggatctaattaaactaaagagcttctgcaaagcaaaagaaactaccatcagagtgaacaggcaacctacaacatgggagaaaattttcgcaacctactcatctgacaaagggctaatatccagaatctacaatgaactcaaacaaatttacaagaaaaaaacaaacaaccccatcaaaaagtgggcgaaggacatgaacagacactactcaaaagaagacatttatgcagccaaaaaacacatgaagaaatgctcatcatcactggccatcagagaaatgcaaatcaaaaccactatgagatatcatctcacaccagttagaatggcaatcattaaaaagtcaggaaacaacaggtgctggagaggatgtggagaaataggaacacttttacactgttggtgggactgtaaactagttcaaccattgtggaagtcagtgtggcgattcctcagggatctagaactagaaataccatttgacccagccatcccattactgggtatatacccaaaggactataaatcatgctgctataaagacacatgcacacgtatgtttattgcggcactattcacaataggaaagacttggaaccaacccaaatgtccaacaatgatagactggattaagaaaatgtggcacatatacaccatggaatactatacagccataaaaaatgatgagttcatgtcctttgtagagacatggatgaaattggaaaccatcattctcagtaaactatcgcaagaacaaaaaaccaaacaccgcatattctcactcataggtgggaattgaacaatgagatcacatggacacaggaaggggaatatcacactctggggactgtggtggggtcgggggaggggggagggatagcattgggagatatacctaatgctagatgacacgttagtgggtgcagcgcaccagcatggcacatgtatacatatgtaactaacctgcacaatgtgcacatgtaccctaaaacttagagtataaaaaaaaaaaaaaaaaaagtttgaatgttttcttgcattcagagccttggttgacatagttaattaaaaataaaacattgtatataaagcacagaatgagcagctacacaaagctgctcaatcaatgacagctctatatgggttagggtttcttgtggggatgacattgatgtagaaagcatggtcatctattgagaatgatggggctggaggtattggatacttgaggtttagaaaatacattgtagaaaatggacaaaaacccctcaaattaagggatgaggcagaataatgcttggcaataccaggggtaggctgcagtctttcttggaaatatatattttaaatggaaccaattatcatagcatcatttcctctcagggttaccctctgatccctattttactaaatcgttataaaacaaaatgaggaattatgtgtccttcccttttgaagccaatgtaacaagatgggtaagaattagacctcctgagttcaaaatccctggattcagatctattcctgtatattcaggagaagtggtaataaattcgatggacaatttggtttagtagtcgattgaggaccctgatgaggtatatttgggaaaacataacttccgctctctctcattgactcacgggcctttgaggagtccaggagtcattggaatctggcctgaggttgaggctgctggcaaaactccttccccaaagtccattcctattgctgactgagaagggactagcattggaagtggctgattttaaataccgctagtgctggtgtgctcctccctcccattcccagctctgctttgtgtagttgccttgagaagctaagttcattctgaaaataatgccattgcacaaaacacttttgaaagttctagtttgaaattacatcaggtcacttggtctgtgtggcctcagtttcttcatctgccatgtgaaaataataatgcctactctgtagcaaagaaagtctctatagtaaacaaaaaaaaagcctactctgatactgaaagttgttatgaaaaataaaaaagggaaatgctttagaaactgttaagtgctatgtagatgttactaattaacaaaccatttcagaaactatactttttattttatggccactattcactgtttaacttaaaatacctcatatgtaaacttgtctcccactgttgctataacaaatcccaagtcttatttcaaagtaccaagatattgaaaatagtgctaagagtttcacatatggtatgaccctctatataaactcattttaagtctcctctaaagatgaaaagtcttgtgttgaaattctcagggtattttatgagaaataaatgaaatttaatttctctgtttttccccttttgtaggaagtcaccaaagcagtacagcctctcttactgggaagaatcatagcttcctatgacccggataacaaggaggaacgctctatcgcgatttatctaggcataggcttatgccttctctttattgtgaggacactgctcctacacccagccatttttggccttcatcacattggaatgcagatgagaatagctatgtttagtttgatttataagaaggtaatacttccttgcacaggccccatggcacatatattctgtatcgtacatgttttaatgtcataaattaggtagtgagctggtacaagtaagggataaatgctgaaattaatttaatatgcctattaaataaatggcaggaataattaatgctcttaattatccttgataatttaattgacttaaactgataattattgagtatcttctgtaaactgcctctgttgtagttttttttttctcctaatcatgttatcatttttttggaatccatggtttcctgttaagatgactcacacagcctacataaaagtaattgacaaaatatcatcttatagtaaaatgccacatatctttatgttcagcaagaagagtataatatatgattgttaatgataacccaaacaacaaaagatttcaccttaactggttgtcataagtagtagtatccaccgccttattttgagttggatttttatcatcctatgagccctacaaatttaaagtttttggaacagcacgtgcattgaacccataagaacctactctgcttttctgcatgtattgtccagacaagagaccaaattgccgaggcatcatttaggtgaattctaattaacatttagctaccttacaaccacaattcaaggttgtttcaaaggcatgtgcttgcatcatcctgattcactaccatgtgttactaacttggatctgcaaagtcattataaaaagctgttttgatggacttatttggatattgctttacccttcttctctcttttcttttatcaatgtaaaaacattatatgttaaatacttggcttttaagagcatagatctgaaatctgcctctagcaaataacccataacacttctaagatatacctgcaaggtcaattgtgttgtaaaaccttgataaccatactttattgttcaaaaaagccttttatgaaggcagaagttaaaaaaaaaaaacaaaaaaaacagagtccacagttatcacctcagctacaatctcatcagttcacaagtaccagcaaaacatgtgataagtcaacaaatgttttatttcaatctgaacattttacgtaagtgaagacattgttagatatcatttggaatgtggaatctacacagttggcatatcagagaaggttgaattcagtttaataaatgtttatagaaagtgcttgttatcataatgataatagctcaggatgtgcatgacaagcttttaagcgattgggtacactatctcatttgatcttctgcacaactattaatggtaggtactattatccctatcttatggataagtaaactaagatttaaaaagtacagaacatggtgtgaacactgcttcaaaatttctaaaataggtaaatcacgatctctaaactggagggttgtccaaccactagggacaatagagtactgatatttagtggtcagactgtaatgcgggaagagacaggcatgggctaaacgggtgtagagatcaaataaggggcaggttagtttgtaaacatgtccatatgtaacatttagcacaaatacaggatataggtgctttcagacccagctgcattgataaaaagttaggtggtattgtatctgtcttcctttctcaatgttgcatatctgtgttcttgcccagtttgcttcatctctctagccacacttattggcctacaatggcatcatcaccaaagaaggcaatcccatcttccgtgtggctttggtttgctccctaaagtaaaccttgtgtttacttttcccaggtctcatgctttcccatatctgacctgttttgtcctcatggccaggatatgtgggacctttcctacaatgttccaaagtttgtaatagagctcttctctgctttgttccaaattctgcaacattttactttaaataatgaatttaaatacaaacaaacttgagctttgcctatacttttcaagaatgcagagataactaaattaataaaaatattcattgagtccttactgtgcacacagctctatgttaagccttgtgcagaactcaaagtcactcgagattaagcctgttactaagttatgtgcaatttagctcagtggatttcccccacttcatattgctctgataatgttttggaattaactgccttgattccttcttttctctgcttgtctatacactatttattattctacaccatctcaaattctaactcctcaagaaaatccttccagatgatttttctaaccaggagttttaacttccttttaactaccctattactttctacttccttaactcatctatcatattatatttagttatttatatactaggtcgccttgaagaagggattgtgttttcataaatcttaataatccctgaggcatcaagtacagtgatttgcatttactaaatgctcaacaaatatgtgagggattcacttgaaactaatattagataattcccagtcaaagtgatctaatagcaaatcaattcttcagttttataggcaaagtatgactctggttttccataatcataattaatttgtcaactttataattttaattaagtaaatttaattggtagataaataagtagataaaaaataatttacctgcttaactacgtttcatatagcattgcatttttctttgtaaaatttaagaattttgtattaataaacttttttacaaaagtattaattattcagttattcatcatatacttttattgacttaaaagtaattttattcaaaagagttagtataggactacatgaaaaattcaaggccaaggcttaatttcaaatttcactgcctttggctctatcttttaaaacaaaacaaaaaactcccgcacaatatcaatgggtatttaagtataatatcattctcattgtgaggagaaaaaataattatttctgcctagatgctgggaaataaaacaactagaagcatgccagtataatattgactgttgaaagaaacatttatgaacctgagaagatagtaagctagatgaatagaatataattttcattacctttacttaataatgaatgcataataactgaattagtcatattataattttacttataatatatttgtattttgtttgttgaaattatctaactttccatttttcttttagactttaaagctgtcaagccgtgttctagataaaataagtattggacaacttgttagtctcctttccaacaacctgaacaaatttgatgaagtatgtacctattgatttaatcttttaggcactattgttataaattatacaactggaaaggcggagttttcctgggtcagataatagtaattagtggttaagtcttgctcagctctagcttccctattctggaaactaagaaaggtcaattgtatagcagagcaccattctggggtctggtagaaccacccaactcaaaggcaccttagcctgttgttaataagatttttcaaaacttaattcttatcagaccttgcttctttttaaaactttaaatctgttatgtactttggccagatatgatacctgagcaattcttgttctgggttgtcttatgtgaaaaataaattcaaggtccttgggacagataatgtgttttatttatctttgcatatccattacttaaaacagcattggacccacagctggtacaaaattaattactgttgaattgagcaaatatttattctaaatgtctctgtcaaatgacagagtgtggttgtgtggattaagtccctggagagagttctttgttctctcatgttctatgctgtggttcttgctttatgcaaaaagaagtaagttacttaaaacctggacatgatacttaagatgtccaatcttgattccactgaataaaaatatgcttaaaaatgcactgacttgaaatttgttttttgggaaaaccgattctatgtgtagaatgtttaagcacattgctatgtgctccatgtaatgattacctagattttagtgtgctcagaaccacgaagtgtttgatcatataagctccttttacttgctttctttcatatatgattgttagtttctaggggtggaagatacaatgacacctgtttttgctgtgcttttattttccagggacttgcattggcacatttcgtgtggatcgctcctttgcaagtggcactcctcatggggctaatctgggagttgttacaggcgtctgccttctgtggacttggtttcctgatagtccttgccctttttcaggctgggctagggagaatgatgatgaagtacaggtagcaacctattttcataacttgaaagttttaaaaattatgttttcaaaaagcccactttagtaaaaccaggactgctctatgcatagaacagtgatcttcagtgtcattaaattttttttttttttttttttttgagacagagtctagatctgtcacccaggctggagtgcagtggcacgatcttggctcactgcactgcaacttctgcctcccaggctcaagcaattctcctgcctcagcctccggagtagctgggattagaggcgcatgccaccacacccagctaatttttgtattttagtagagacagggtttcaccaggttgcccaggctggtctcgaatgcctgacctcaggtgatccgcccacctcggcctcccaaagtactgatattacaggcatgagctaccgcgcccggcctaaaaaatactttttaagatggtgtaaatattactttctgtatcaatggtacattttttacttgtcagtctctagaatttctttataaatatgttgattcagttcatttttgtagattataaaacaggtaaaaaaggataaaacatttatgtgaattaaagggaatacctaatttttgtgtagagtttattagcttttactactctggtttatggatcatcacaccagagccttagttactttgtgttacagaataactaatatgagtgaatgaatgacttacacaagtcactgcttaggataaagggcttgagtttgtcagctagagtatgacagaaagtatctaagttttggagtcaaatagcactttgtttgaatcccagattgcatgcttactagttatgtgaccttagtcaagccacttcacctcactgagtctttgcttttttcatctctaaaatagagatacccaccgctcataggctgtcataagggatagagatagcatatggaatgagtctgtacagcgtctggcacataggaggcatttaccaaacagtagttattatttttgttaccatctatttgataataaaataatgcccatctgttgaataaaagaaatatgacttaaaaccttgagcagttcttaatagataatttgacttgtttttactattagattgattgattgattgattgattgatttacagagatcagagagctgggaagatcagtgaaagacttgtgattacctcagaaatgattgaaaatatccaatctgttaaggcatactgctgggaagaagcaatggaaaaaatgattgaaaacttaagacagtaagttgttccaataatttcaatattgttagtaattctgtccttaattttttaaaaatatgtttatcatggtagacttccacctcatatttgatgtttgtgacaatcaaatgattgcatttaagttctgtcaatattcatgcattagttgcacaaattcactttcatgggctgtagttttatgtagttggtccagggtgttattttatgctgcaagtatattatactgatacgttattaaagaatttcctacatatgttcactgctgctcaatacatttatttcgttaaaacaattatcaagatactgaaggctgattggtaactcacatggaactgggagagtatacaattctgaaccaaatagatgattctctattattatatcttaatttatgtgttatggtatattaaacatgaaaaaaattgtatttggttagaatatgtttgctcttccttaactcgggaatgacatagggtaatattcacagattgggttcctataaatcctccacttgaagtgaagtcagttcaagtaatgaaagctacctcctgagatagaatcagtacttggcacctatctctagtgttctttcacctcatataacctttcactgattagtaaagattatatccaacaaagaaagtacagcacagactgagatatgattactgagataaatttgggcaaaatataaactacagcatttctgtagcaatgagaccatttttcttcagttgagctccatgttctacaaacttcaatcaaaaaaggttctaggagactcagtgaaagttgatacactgttcaaggaacaaataatttcagcacatgggaatttcacagggaaaaatatactaaaaagagaggtaccattttggatggtgtcaatatgggttatgaggaattcaggctgctgagtccagtgtacaatggaaactgagctgcaggtgtgtgattgtaacaacaaaagaaatgctgaaatattaagtcctttgccatgtaaatagaaaaagagtatttatttcccaaacattattgctcacctgtttttgttatgcctttcaagataaatccaggaaaggaattgcattttctttccagaaaacaagttcttgggggaattgttcaattggtagatgttgtttttctcattaacaagtgagtgctccatcacacttgctgagtgctccatcacacttgctctctgcattactcctctgcctgcaaacacatatatagcaagggtgatgacaaggatatcagagggtctggttttctcaaactcatgataaactcatggctgggtcattcttggtgctgattttactttgttttttgttgttattgttccctcttcctcaaaagatgaaatctatccctcttacttggaatttctctttgatatatagcgaatgtttggttgtaacctgtataatctggcatgaaattgtcactcgaaaaggctagaagtgttgacataaatatgggacagcaagagttgctcctactcaagagagcaaatataatgttctggaagagattggcagaattcacatcaaaggagtgattacttcagcctgggccactgttgtactggtcaaaaggctgtgcaaagctctctgaaaatccactcttttattgctctttagtaataaagtcactttcaattttaaaaataacaaactgatatatttttatgactcataaaatgttagcaattatattatggagaatctactttctgggtgattcttacaaatgttcttggatctatttttttttcttatagtacctattcttcccatttttctcagctctagttaatatatttcaacaacagttcaacaaatttaacatttttataaaaagtgtttcctatcattttataaataccagcctagtccatgttattccttttcttgttgaggagaaaggacacacattgtaaattcaaatatagacctctactgtgctatttaatcttggtaacaactccacaaaggagatgacatgttttccttctatagaggtagattctgtaaagttagagggaagagtgacttgcttaagatggcataagctgtaactggcagaaccaggattcaaagccaggtgggatgccaaaatcataatctgtcttcagtgtcaagttactgaaattggtaaacattagacctaaatagacggaattgcaatccgggttgggcacattaaactccattttcttcatcaatgtgctcagattacattttacttttcaggctaaaaatggaaaaaaagagtccctcttagttctgcacttgagaatgagaatagcttttctgaattatacaaggaagaagaactaatgcccaaatgccaggtacccacatgcactatgccatggcacagctgttgccccctttcaccagagccctctctctgtatcctggttgacctttccttgggcaagagctgggtggggaggatcacaagtgactccaatttggatggcttcgggaagactgggaccgagctgaaggcagtgttgtcctctgcactccctgttttctgtctgctggagcactgaagcctcacatatgtattaaaaaaataatttccatttgcatttcagactagaagattgaacgtatagtgtaatgtgattgcaaataattatattgaaatgagacagagaggatgtagtatctactgtcataatttttcaaaacccacctgcaacttgaattaaaagaaccacttgggtttttttttttgtttcaaacgcaaatcctggaaacctactgagactcattcagtcagtatctctaagaggcaagcttgagactgtatatttaaaaagcatctcaggtgatttttacacatgctaaggcttaagaaccacttctctgtagcttatatgttattttcaatgttcctcaaagccaagttagaatttccaaagtgttaagaatccattagacaatcacagaattgtctttttcctttataaatcttgcaatgttgttctcatttccatacttaattacttaaaacaccaaccaaccaacaagcaaaaaatgattagtctaactaatattacaagttaataatgaagtaaaggtttaaaaataatgtcataataatgttaataacaaattattaattataatttaaaaataatatttataatttaaaaataatatttacaagtactacaagcaaaacactggtactttcattgttatcttttcatataaggtaactgaggcccagagagattaaataacatgcccaaggtcacacaggtcatatgatgtggagccaggttaaaaatataggcagaaagactctagagaccatgctcagatcttccattccaagatccctgatatttgaaaaataaaataacatcctgaattttattgttattgttttttatagaacagaactgaaactgactcggaaggcagcctatgtgagatacttcaatagctcagccttcttcttctcagggttctttgtggtgtttttatctgtgcttccctatgcactaatcaaaggaatcatcctccggaaaatattcaccaccatctcattctgcattgttctgcgcatggcggtcactcggcaatttccctgggctgtacaaacatggtatgactctcttggagcaataaacaaaatacaggtaatgtaccataatgctgcattatatactatgatttaaataatcagtcaatagatcagttctaatgaactttgcaaaaatgtgcgaaaagatagaaaaagaaatttccttcactaggaagttataaaagttgccagctaatactaggaatgttcaccttaaacttttcctagcatttctctggacagtatgatggatgagagtggcattttatgccaaattaccttaaaatcccaataatactgatgtagctagcagctttgagaaattctaaagttttcaagtgataagactcaatttatacaaagctaattggataaacttgtatatgattaagaagcaaataaatacttattatgcttttttgctgtttatttaaatatttaacccagaaaataagtcactgtgacagaaataaaaatgagagagaagggtgagccactcttaggtagttctggcattatttaatctaggccagaggttgcaaatggtgtcccatagaactaattttggctcctagacctgtcttatttaacctttcatttaaaaaatttgtattggttgccagcaattaaaaattgggagatgtctcacacacacacacacataaacacacacactcatgtgtgcagcctcttttgaagaattggaataactagtcaactgcgtcctccttttccacaagctgtgacagctccctgctcacagagcacctgccctctcctgttcatcatgctctcttctcagtcccattccttcattatatcacctatttggtcctgagactaagtgagtttgagatctgtgatttagacaaagtggtgaatctagctctgaatcatagtaagtagctctgggaatcatcttgtcttctgttagcccattgagagagaaatagagagagagagagagagaaagaaagaagaagaaacagatctggggagagtcactgaatgggagcatagagacagagaaacagatctagaaaaccaaactgggagaaaatgagagaaaccaaaagagaggtagagaggagcagagaagaaaatgaagaagcaaggcaaggaccaggctttttcattatttcttatggccaagacttcagtatgcgtggacttaattcttccttatgctcctaccttccctagggaaactgatttggagtctctaatagagcccttcttttagaatcacagtttgatgccttaaaactagttatataccttcacatgcttccttaacccacagaagtgatgctaatgaggcccttaataaggagcgtgctattaagatgaagacattcattttttttctccgtccaatgttggattaaggcacattagtgggtaattcagggttgctttgtaaattcatcactaaggttagcatgtaatagtacaaggaagaatcagttgtatgttaaatctaatgtataaaaagttttataaaatatcatatgtttagagagtatatttcaaatatgatgaatcctagtgcttggcaaattaactttagaacactaataaaattattttattaagaaataattactatttcattattaaaattcatatataagatgtagcacaatgagagtataaagtagatgtaataatgcattaatgctattctgattctataatatgtttttgctctcttttataaataggatttcttacaaaagcaagaatataagacattggaatataacttaacgactacagaagtagtgatggagaatgtaacagccttctgggaggaggtcagaatttttaaaaaattgtttgctctaaacacctaactgttttcttctttgtgaatatggatttcatcctaatggcgaataaaattagaatgatgatataactggtagaactggaaggaggatcactcacttattttctagattaagaagtagaggaatggccaggtgctcatggttgtaatcccagcactttgggagaccaaggcgggtggatcacctgaggtcaggagttcaagaccagcctggccaacatggtaaaacccggtctctactaaaaatacaaaaaattaactgggcatggtggcagatgctgtagtcccagctgctcgggaggctgaggcaggagaatcacttgaacctgggaggcggaggttgcagtgagctaagatcacgccactgcactccagcctgggcaacaaggcgagactctgtctgaaaaagaaaaaaaaataaaaataaaaataaaaagaagtggaggaatattaaatgcaatataaaagctttttttatttttaagtcatacaatttgtttcacataacagatcaggaaataatacagagatcataagttttggagctgggtttgaatcctggctctgccatttactttctgtgtaatctaagtcaagttactgaactttgtgggccctctggctctccatgtgtaaaatggagaatattaatatttaccttgcaagtttgttgtgaagactgaaggagagaatttaggtaaaacattcatcagagtaccatgcacacagttgttcctcaataaacattagcttctctgattgcaagttccagtctaaagtgctttatatataccagccaataaaaggatgcgagagagatataccagtgtattgttttctaccattttaaacctattttcatccactgttacaaattctatcatactgctccacataaaaaatattatcaatgatttttagtctctgaagtgcaatatttgattattgagcacacctgttgaagttttagtttcttctcacttacatgggttgtgtaaaggtaggaggtataaaaccagtgtcctaggtctaaatctttcttaatgtcatactttggattcattgatataagtaacttgagcaccagcgcttcattttacttcattttttaaagatatagtaagagtaattcccatctgcctagcaaaattgttttgtagaaaagtttgtggatcagatttattttactttgattttaggaatttcaagtgtcttcgtcggcatgaaggaaaaatatgcagtttgacattttctactactttcaggtcattattttcctactctggtgcaaaaaccctcaattcctgtctcactccatctaatcaaataggtagcatgcttgagcccttactatgtgccaggcactaggataagcactttatatgttttgtcccaattaattctcacagcatttctatgacctaaataaaattaatattttcatttcaccaataataaaatggaggcttcaaaaagtttagggacttggctcagctcacacaactggcaaggactgaaaatggattttagtcccaaatgtcataggctagagccctttcactaaactgttgtcttccatctggtggcatcctcttcctccagtctttgtcacctaaactctgggcaccccttgatggcatttacttatgatggtgatgcttgttaaacttcctgtttgcgacttcaacgtccatataaatgagtcttccaatactgtacttagaacttatattttgtagtgacttctttaaaagctttctctcttagtcatatcctgagttttgttagcacctggacttaccttactttggaaatgttgcactctgaaatctctttctcagcttggaatttcctaatcttccaactgtttgagtcttttaattctacatttactgcctttccatttcatcaggatttctagtctctttaattcttccttttgaactcctcctgatttaacctctgcttattcgaagaacaataattttattctctcagctgcactctcaattcccttttccttttggtgatttttctttttcctacagaacacttactttatcagttttggagaaggaagtgctatctgggtaacagtagtgctatctgttgactctagtcaactgtaagttttatacatttattgtttaaaccttatatgggtctataatccttcttgggaaatcctttcatttgtctttaatttcctttaccatttccctaaaggctattccagatttttatcacattcacaaaattcccgtcttttctcaggatctgttcacccccagtagatagccttgtctcccacaatacatggagaaaatagaggccaccgtcatatttgaatgtttccaacttctctcttcacctttggaattatctttttcttcttttgtgtctaagagaaagatgtatacttcttcttacccttgtctgaactactctattttgcttcatcttctcagaacaggggaccagcaattattcttcctccagaagcttcaacatcttttgtcaactgactccttctcatgtttaaatattttcaagttaaacaatttctttcctgactttcgctcacgcaacctcatgcccaaaaccttatcactcttcttccctttgctgtcaaggctgttctcacttcttcactttttgtggacttctccccactacaacatagattctgctatcaccaatctattaaaactgttatactcttgtggaatttatcatttaatttagcttcagtgaaccgttctttccagattattttggcctcagaccatgacttctaagtctgccgtgcttgccacttaagtgatgatgggccagtgggtccccacctaggcctctgtgttagtctgttttcatgttgctgataaagacatacccaagaatgggcaatttacagaagaaaggggtttgagggactcacagttccatgtgactggggaggcctcacaatcatggtggatgatgaaaggcatgtctcacatggaggcagataagagcatagaacttgtgcagggaaacttccctttattaaaccaccaggtcttgtgagacttcttcactatcacgagaataggatgggcaagaccctcccccatgattcaattatctcccactgggtccctcccacaacacatgggaattatgggagctataattcaagatgagatttgggtgaggacatagccaaaccatatcagcctccttctggctttttatgttctccgtgggtgacctctctcaggctcaagtgataaccaatgtgctgatgactctcaaatgcgcatctctggcttcagtttcttccttgaacttcatacatatgtttccaaatttcctgcgtgtacctcaaggttcttgttcatcacttcccaagcttcataaacgcactcattttagtgtattctctgtctcctttgatagcatccctgagaggcaagtccctggtgagttatatacaactcctcccttgctccaaacctgagagtaagtaacattcctattaacatattaggaagctgaggcttagacagtttaagtaactcaagcatggttacacaactagctagggcagagctaaaatgtcaggctaggcttctgtgactccaaagccctttctcacttagcatatcatcacttatttttttttttaatcacatatatgatttttttttctttaagagatagaatcttgctctatcacgtgggctggagtgcagtggcacaatcatagctcactgtaaccttgaacttgggctcaagtgatcctcctgccttagcctactgagtagctagggctacagacacacaccaccatgcctagctaattttattttattttattttattttttgagacagagtctcactctgtcacccaggctggagtgcagtggtgcgatcttggctcactggaacctctgctgcccgggttcaagcgattctcctgcctcagcctcctgagtagctgggattacaggtgcctgccactgtgcccagctaatttttgtatttttagtagagacggggtttcaccatcttggccaggcttgtcttgaactcctgacctcgtgatccactcgcctcggcctcccaaagtgctgggattacaggtgtgagccaccacgcctggccacctacctaatttttaatttttttgtagagacagggtctcactacgttgcccaggctggtcttgaactcctgttctcaaacaatcctcctgcctcggacaccccaagtgcagggattacaggcatgagtcattgcagctgacctgtatatatgatttttagtatatgtaaatatacatatttattaaatgtaaatataaatataaatgtgtggagtgatatccattgaaatgttaaacatagttctcagtggtacaactacaggtgatttctcttttcttatttctggttttctgtgttttccaaatttcttgaaatgtgtcttctgtaatcagaaataaaagttattagtaacaacagtcttccactggtacaagtgcttattggataaaagtcccacttctaagcatgatactcacaacttttaggttaatagcctttgtcaccttgccatatacatctgatccagccactcacaccattcctgagatatattttgttcctttgtgcctaaatcattgtgcatgcagatccatcttcctggaacacctataaccatttcttagtcctgtgaaatcctacttacatccttcatagcctagcatgtatgtcatttatttggtcaagggtgagttggttgttctcttgaatgtactgccatatgacgtggtgtgatttcaattgtagcaccaagctcattgcaatattaattcgtttgtcattctcccatgtaggatgtttgaagtagtttctaacacagagattatactcaataaatatttattagataaataaatgaataagggaataacaaatgcctttgtctcattttaaaatactttcattgttagctacccatataataaaaaactaaaagcagtagttttcaagcatgattgtttatgtatgccttaaaagaattttgaaaacctatgtacccctgacacacttttaagttaacttataaatttttcaacatagttttaagtggtggcaaatgatgtagtttcttgtgtattttaaactgcttaagtatgctatacatggatttcttcaaaaccctgaagctgcagtttcagtgcattcaatttatggaaaagaaattaatttataaaattggttcttattgtcaagtcaatcagctaaatataacttgctttctgtcaggaaaagtctgactttaaaatacagataagtaataactattattaattaattaaattattaaaattaaaataattaaataatttgttaattaaaatgccttattcccctacttatttctgcaatttgactctaagaatagataggacatgtagattgccttaggtttgaaatctgggtgaaataagatactgcctccttcagtatttctgcctttgcttttatgggagcctctttcaagaaaaagtcattctctcatggtccctttgtttgagtcccagaggttttcctactccagaaagtgcaacgtagtgagactagtactatactcccttgcatggtaagtgagaaggctgtctgtataaaatgagggaaggactcatgagagggaagtaggtcaggagaaatgataggttctcaggcaggttaattttaggaaagagtgaatagagtcccttaaaacaaggtgcatctgcttcctcctgatcaatctttaggactgtttactttgatttgaagaccactatgctaaagcttcccacgggggcaatagtgaggcaaggaatttttaaaagggaattacttcttcgtagctacttttgtgaaatgaattcatttgaattatctggcaatctcttcatatttatattcaacaataattacttaaagaaatgctttgagcttctcagaggagggtgctaccagtgtgatggagtagaattcagatttgggtagtgactttaaagctgtgtgactttagtcatttaactgctgagtcacagtctacagctttgaaagaggaggattataaaatctatctcatgttaatgctgaagattaaataatagtgtttatgtaccccgcttataggagaagagggtgtgtgtgtgtgtgtgtgtgtgtgtgtgtgtatgtgtatgtatacatgtatgtattcagtctttactgaaattaaaaaatctttaacttgataatgggcaaatatcttagttttagatcatgtcctctagaaaccgtatgctatataattatgtactataaagtaataatgtatacagtgtaatggatcatgggccatgtgcttttcaaactaattgtacataaaacaagcatctattgaaaatatctgacaaactcatcttttatttttgatgtgtgtgtgtgtgtgtgtgtgtttttttaacagggatttggggaattatttgagaaagcaaaacaaaacaataacaatagaaaaacttctaatggtgatgacagcctcttcttcagtaatttctcacttcttggtactcctgtcctgaaagatattaatttcaagatagaaagaggacagttgttggcggttgctggatccactggagcaggcaaggtagttcttttgttcttcactattaagaacttaatttggtgtccatgtctctttttttttctagtttgtagtgctggaaggtatttttggagaaattcttacatgagcattaggagaatgtatgggtgtagtgtcttgtataatagaaattgttccactgataatttactctagttttttatttcctcatattattttcagtggctttttcttccacatctttatattttgcaccacattcaacactgtatcttgcacatggcgagcattcaataactttattgaataaacaaatcatccattttatccattcttaaccagaacagacattttttcagagctggtccaggaaaatcatgacttacattttgccttagtaaccacataaacaaaaggtctccatttttgttaacattacaattttcagaatagatttagatttgcttatgatatattataaggaaaaattatttagtgggatagttttttgaggaaatacataggaatgttaatttattcagtggtcatcctcttctccatatcccaccctaagaacaacttaacctggcatatttggagatacatctgaaaaaatagtagattagaaagaaaaaacagcaaaaggaccaaaactttattgtcaggagaagactttgtagtgatcttcaagaatataacccattgtgtagataatggtaaaaacttgctctcttttaactattgaggaaataaatttaaagacatgaaagaatcaaattagagatgagaaagagctttctagtattagaatgggctaaagggcaataggtatttgcttcagaagtctataaaatggttccttgttcccatttgattgtcattttagctgtggtactttgtagaaatgtgagaaaaagtttagtggtctcttgaagcttttcaaaatactttctagaattataccgaataatctaagacaaacagaaaaagaaagagaggaaggaagaaagaaggaaatgaggaagaaaggaagtaggaggaaggaaggaaggaaagaaggaaggaagtaagagggaagcagtgctgctgctgtaggtaaaaatgttaatgaaaatagaaattaagaaagactcctgaaaggcaattatttatcaatatctaagatgaggagaaccatattttgaagaattgaatatgagacttgggaaacaaaatgccacaaaaaatttccactcaataaatttggtgtcaggctgggtgcagtggctcacacttgtaatcctagcacttttggaggcagaggcaggtgaattgcttgagtccaggagtttgagaccagcgtgggcaacatggcaaaccccacctctacaaaaaacacaaacaaaagaaaatagctgggtgtggtggtgtgtgcctgtagtcccagctacttgggaggctgaggtgggaggatcacctgagcctgagaagtggaggctgcagtgagccatgattgcaccactgtaccctagcctaggtgataggctcaaaaaaaaaaaaaattggtgtttgcaatgctaataatacaatttggttgtttctctctccagttgttttcctacatacgaaacagcttttaaaacaaaatagctggaattgtgcattttttcttacaaaaacattttctttcttaaaatgttattatttttcttttatatcttgtatattattactagcagtgttcactattaaaaaattatactataggaggggctgatactaaataagttagcaatggtctaaacaaggatgtttatttatgaaaaggtagtaattgtgtttcatagaatttttaaaattaattctgcgtatgtcttcaagatcaattctatgatagatgtgcaaaaatagctttggaattacaaattccaagacttactggcaattaaatttcaggcagttttattaaaattgatgagcagataattactggctgacagtgcagttatagcttatgaaaagcagctatgaaggcagagttagaggaaggcagtggtcccttgggaatatttaaacacttctgagaaacggagtttactaactcaatctaggaggctgccttttagtagtattaggaatggaacactttatagttttttttggacaaaagatctagctaaaatataagattgaataattgaaaatattaacattttaagttaaatcttacccactcaatacaatttggtaatttgtatcagaagcttaaaagataacctaatagttcttctacttctataacttacccaaatatgtttgcagagatcttatgtaaagctcttcattataacactgctttcaggagccaaaaattgggtgggggagccccataaatgttgaataataggggtttgattagataaattttggtgtagttctataatggcgtgttattcagccaataaaaggtttgttaaagaatgactgtgacggatgtatatgatatactcttaagtgaataaagagttacaaaatgttatgtacaagttacaaaatgtatgtacattatgatccatttttcataaaatcatatgtatgtatatatgtgtgtctggaaggataaatttatcaagttgttatctctgaaattttgggtatattttatatttctagattttctgttactttgttactttactgataaagtaataacgttgttgacttttgtcactctcccctattaataatcatctaggctgcaaaaggatcatgtcttctttatttttatattccaaggactgtcaacaagtgcctagcacttgacaggtatattatagaaatttaactgaatatctttaggaaatagatttttgtttgtagttgttctagtctacattaaatgtcttgcgcttatgaaacttccttgaattattttagtgaagcaatattagtatagaattttgcatcactggatgcccttgactgaaagctggcttatggcatctcaccagtgtgtggggagtttcagtccttctgttgtctgcatcacagctgaagcagtgctgttgctgacaattcctgacaccaccttgtctctattattgatcattgcctcactatggtactgagttttagcttattcttgtaataactgggactcatatgtatagaataagctattagctcacgtttttgcttgctttttatacagaatacatgtctgcaaatagttttatcaatattttggaattttgggagatatgaagttaaaaacatcattgaatatatatatatacacacacacatatatatatgacactatacatgatttattttatttaatttttaaaattttattctttttagagattaggtcttactctgtcacccaggctgaacttcagtggtgtgatcatagctcactgtaaccttgaactcctgggctcaattgacctttccgcttcagcctcccaaagtgctgggtttataggcatgagccactgtgtctggtccaatatgcatatatatatttttaacctggattatcagagctatattgtgtttaggtttataaagctgtactatgtgaaaatatcacttctaggtttaattttgtacaaaggaattttatatagaaatgaggtaattcagattttttcccatgtaataagaattgtaaaatttactgaaacaaacatcaaaaagatatctgttacatgaccttcctttcttttgaatatatttcaggtgatattatttattaaaatttaaaaatgaaaattaaaatatataaaaagttgaaaattattcctttctttactgtctctcatctgtccattttccattctcctgcattccctcatccaaccaaggtagccaatccaggtaactttttttagtatcttcccagagatgtttctctctatatatataatcaatatacattttttattattccccacctctctttttatgtaacaatatgcagagttttgcttcttgcttttcccactatcttggacaactttccatattcaaagcacagaggacttgcacatatgttcagactgctgaatatttctgtctctcccctgccattcatatgttgaaatcctaattcccaaggtgatggtattgcagggtggggcctttgggaggtgattagtccatgagggtgaagtctttagtaaatgagattagtgtctttataaaagaaaccttagagagaccctcacaccttagagagaccctcacccctttctgccatgtgagaacacagcaggaagacagctggctatccaggattcaggagtctcttagcagacccaaatctgctggcaccttgatcttggacttcccagcctccagaactgtgagaaataaattcctgttgtttataagccacacagttcatggtattttgttatagcagcctgaacaaggacacacacacacacacacacacatgcacacacatttaaatagatgcatagtattctatcatatggatggatattctatgatataatgaatcactattgattgacatttgggttgtttccaatattttgttaacacaaagaacaacactacaaataactttatatacatatcatttagcacatctgcaattgtatcagtaggcttcctataagtggtcaagcatttgtgtacttgtgattttggtagatgttgtcaaatgtccttccctgaaatttgtaccaattcgtactcatgccatacactctaaatagagtgctgatttccccacagcattactaacagatgatattatctaatttaaaaagtttctcatcttatagggaaaatagtatgtcaatgtattcttaacttgcatttcttttattataagtagtgtaaaatatcatttcaacttatacacaggaggaatttctctctatataaagtgatcctagaatcataatgaaaaatatcaccaactcattaggaaaatgtacaaaggattgaatagatatctcatcaaaaataaaaatataagtggcctttaaacattgaaaggtaacatttgaacaaagacttgcaggaggtgagggattagggaatgcagactctgggaagagtcttccaagtagcaggtgaagcaagtgcaaagctttcagatgggactgactatacctgtctggtttgaagaacagtaaggaggtcactgaggctggcatagagtaagacagggagggtagaatactgtcagagaagtaatcggcggtggaggtagggggtaaaccataaagtgctcgtaaagactaaggcttatttctctgggtgagattagaggccactggagagttttaaacagaagtaacagggccactttggctaatgtttttaggctattctgtagggagacaagggaggaagcaaggagatgagttaggagtctattgtgccagttcaggcaagtgatgatggtggcttgatccaggtagtagtggaagtagtatagtaggaagtgatcagattcaggacatgctttgaaggaagatccaataggattaatggataagttgaacaatggcatatgagaaaagtcacagaggagtcaaagatgattccaagctttctggactgagtaactggaaggataaatgtgccgtttactagaaagataatgggagaaacaggttttggatggagcttggtttgggaatattaagtttgaaatgcctatttgacatccaaatagagatgttagttggatgtacaagtctagtttcaaggaagagggggctggtagtgtgaagatggggctggataagattctaaaggaaagagggttgataagaagagaaaggggtgtaggggttagcctaagggcattctaagtattagaggttaaggaggtgggtgaagaaaacccaataaaataaaagtctgagaagacaaagctagtgaatgaatgtggtatcccggaacccaactgatgtcaagcagaagggtgttatcaactaggtcaaatgctcattcatcaagtaagatgaaactgttataattaaccggtgtcttctgaaatacggagataactcgtgacttaatgaaagcaatagtagagaaggtcaaacttgaccagaatgaaattagaaagaataagaggaaagaaaagaccaaatacagacaaccattgatgccttattcttttgatatactcctggagtccacttgctaatacaattgacccttaaacaatacaggcttgaactgcatgggtccacttatttgtgaattttttttcagttaatacattggaaaatttttggggttttttgacaatttgaaaaaactcacaaactgtctagcctagaaataccgagaaaattaagaaaaagtaagatatgccatgaatgcataaaatatatgtagacactagcctattttatcatttgctactataaaatatacacaatctattataaaaagttaaaatttatcaaaacttaacacacactaacacctaccctacctggcaccattcacagtaaagagaaatgtaaataaacataaaaatgtagtattaaaccataatggcataaaactaattgtagtacatatggtactactgtaataatttggaagccacttcctgttgctattacggtaagctcaagcattgtggatagccatttaaaacaccacgtgatgctaatcatctccgtgtgagcagttctctctccagtaaattgcatattgcagtaaaaagtgatctctagtggttctcgcatatttttcatcatgtttagtgcaatgccataaaccttgaataacatcaagcaatccatacaaagtgccactagtgatgcacggaaaagttgtaacagtacaagaaaaaagttgagttgcttggtatttaccatatattgaggtctgcagctacagttgcctgcaatttcgagataaatgaacccagtataaagactgttgtaacaaaagaaaagaaaatgtgaaaccatcagtgcagctatgccagcaggtgtgaagtcttgcactttttgcaaaatacaaaatatgaaatatgtgttaattgactgtttatgttatctgtaaggtttccactcaacaataggctattagtagttaagtttttgtggagtcaaaaattatacgtggatttttgactatacagtgggttggcacccctaaccttcatgttgataaagggtcaatggtatattatttaatttttttgtatttatattcataaataagattaaatctatatttccaagtaatctctataagattttgttattaatattactattatttttgagacagagtcttactgtcaccaggctggagcacagtggtgcgatctcggctcactgcaacctctgcctcccgggctcaagcaattctcctgcctcaccctcccaagtagctgggactacaggcacgcacaaccacactcagctaatttttgtatttttagtagagacggggtttcaccatgttggccaggatggtattgatctcttgacctcatgatctgcctgcctcggcctcccaaagtgttgggattacaggcatgagccactgtgcacagccattaatattattgttacccaataaaaaaaatttggaaacttgtcttcttttcccctgattctgtttaaatagcactggagttacctgttttgaattttttttccaagcggtcccttatgagttttctctatgttttatttgtttcatttcttttttttttttttttttttttttgagacggagtctcgctctgtcgcccaggctggagtgcagtggcgggatctcggctcactgcaagctccgcctcccgggttcacgccattctcctgcctcagcctcccaagtagctgggactacaggcgcccgccactacgcccggctaattttttgtatttttagtagagacggggtttcaccgttttagccgggatggtctcgatctcctgacctcgtgatccgcccgcctcggcctcccaaagtgctgggattacaggcgtgagccaccgcgcccggcctgtttcatttcttatatcgtatttttgcaactcctttattgatacttttcttcctgattaggtttctactaaaaccaaacaagctttccatgaattagcttttagatttacttattagtttaactgttctgttgtattgtaactcattaatttataattttatctttattaattattctatttttcttcgcttttttgttgtttttctagtttttgagttagatgtttgacgcttttttaaaaagctgtgcattttcctctgggtaatactttagctgtatattatgtattctgatatatagtgtttccattacattgttttctagaaaatctgtagctttgatttatatttgtttcctctttgacctaagatatcctaagggaaaatttaacattttccagaaagaaaacaaattttctttgttttccaagaatgttgttcaaattatttctactgcttggaatttttatcatttttgtgtatccagtaaatagtcaatatttgtacttgctctctgaccacataaaagaatatattcgtgtagtttctattaatagattagagttcaattcagatattaaatgtacatcattattcatgatatttaggtcttctacatcttcacttatcttttttctacttgctttgccattaacagataaagttgaattaaaggcttctactacatacatttctccctgttattccttataggttctgtaatttttgcttcaagaatattgctttttaaatttaatatatagatacttataattacactctagcattataaagagccttttctttttcattgaatgtatttgggcctgcatatgtctaacatgaaaattatagtcctttttttgtttctttgtttgtatttacagttttaagttccattttcaacctttatgcactctttgctttaggtgtgtctcttttagttagcataaagttaggtttgtctttaatttcacctgaagtcttttcctcttaatagatgggttaagccaactgaaaaataaaactgacttatatacttttatttcaagtatgtcctccacaaatattttttgaatagattagcttatatactttggaatttgttaaaaaaagatttttataaaaaataattgtggtgaaatgtacataacataaaatttatcattttgaccatttttaagggcatagctctgtggcataaagtatactcacatagttgtgcaactatcacctccttttgatttttttttactaattttgtaaatttgtttcatctgagctgtcttattatgttttgttttatgtttttctttcctttattatgaagtcactgtattgtctgtaggctatatgtatctgtgagtgtgtgtgtatatgtgtgtattatggtttttaaaaaagtctatatttgttttccagtggctatacttaatactaataactttatgttaaatttttcattctatgtgactctagttcactaatatgagctctgataaaatcagtgctttttcgaggttaggagatcaagaccatcctggctaacacagtgaaactccgtctctactaaaaatacaaaaaattagccagacgtgatggcgggtgcccgtagtcccagctactcgggaggctgaggcaggagaatggcgtgaacccaggaggcagaacttgcagtgagccgagatcgcgccactgcactctagcctgggtgacagagtgagactctgtctctaaataaataaataaataaataaataaataaataaaatcagtgctttttcttcctctgctacctcctttccttctactcagttttagtcagtagtattatcttttttcagatttatctttgtattgttaaatctgcttatgcttctattactttatttattagctttaaatgataccttttgactttcagcttttcttaataaagcaatcagcaaatttcctttacactccacacttataccccatttcctttgtttgtttatttggtttttacttctaacttttcttattgtcaggacatataacatatttaaactttgtttttcaactcgaattctgccattagttttaatttttgttcacagttatataaatctttgttcactgatagtccttttgtactatcatctcttaaatgactttatactccaagaaaggctcatgggaacaatattacctgaatatgtctctattacttaatctgtacctaataatatgaaggtaatctactttgtaggatttctgtgaagattaaataaattaatatagttaaagcacatagaacagcactcgacacagagtgagcacttggcaactgttagctgttactaacctttcccattcttcctccaaacctattccaactatctgaatcatgtgccccttctctgtgaacctctatcataatacttgtcacactgtattgtaattgtctcttttactttcccttgtatcttttgtgcatagcagagtacctgaaacaggaagtattttaaatattttgaatcaaatgagttaatagaatctttacaaataagaatatacacttctgcttaggatgataattggaggcaagtgaatcctgagcgtgatttgataatgacctaataatgatgggttttatttccagacttcacttctaatggtgattatgggagaactggagccttcagagggtaaaattaagcacagtggaagaatttcattctgttctcagttttcctggattatgcctggcaccattaaagaaaatatcatctttggtgtttcctatgatgaatatagatacagaagcgtcatcaaagcatgccaactagaagaggtaagaaactatgtgaaaactttttgattatgcatatgaacccttcacactacccaaattatatatttggctccatattcaatcggttagtctacatatatttatgtttcctctatgggtaagctactgtgaatggatcaattaataaaacacatgacctatgctttaagaagcttgcaaacacatgaaataaatgcaatttattttttaaataatgggttcatttgatcacaataaatgcattttatgaaatggtgagaattttgttcactcattagtgagacaaacgtcctcaatggttatttatatggcatgcatataagtgatatgtggtatctttttaaaagataccacaaaatatgcatctttaaaaatatactccaaaaattattaagattattttaataattttaataatactatagcctaatggaatgagcattgatctgccagcagagaattagaggggtaaaattgtgaagatattgtatccctggctttgaacaaataccatataacttctagtgactgcaattctttgatgcagaggcaaaatgaagatgatgtcattactcatttcacaacaatattggagaatgagctaattatctgaaaattacatgaagtattccaagagaaaccagtatatggatcttgtgctgttcactatgtaaattgtgtgatggtgggttcagtagttattgctgtaaatgttagggcagggaatatgttactatgaagtttattgacagtatactccaaatagtgtttgtgattcaaaagcaatatctttgatagttggcatttgcaattcctttatataatcttttatgaaaaaaattgcagagaaagtaaaatgtagcttaaaatacagtatccaaaaaaatggaaaagggcaaaccgtggattagatagaaatggcaattcttataaaaagggttgcatgcttacatgaatggctttccatgtatatactcagtcattcaacagttttttttttagagccccattcttattttttatacactttgagagcataatgaaaagaaaagctacctgcaaaagttttggacttacctcaaagaggatatacttcattcctcaaaaggccttcttccaggaatagtatttcataacctggaggttggaaaaatctggatttgttacaaaaaaatctgagtgtttctagcggacacagatatttgtctaggaggggactaggttgtagcagtggtagtgccttacaagataaatcatgggctttatttacttacgagtggaaaagttgcggaaggtgccttacagactttttttttgcgttaagtatgtgttttcccataggaattaatttataaatggtggtttgatttcctcaagtcaacctttaaaagtatatttagccaaaatatagcttaaatatattactagtaataaatttagtactgtgggtctctcattctcaaaatgagcatttactaatttctgaacactgtgctaggtcctgggaataccaaattgaataagacatagtctatttttctgaagggtttatagcagagtcccctgtgttaataatgaaggagtgtgtggtatgtgaatcatatatcaatagggttgttaaaaataatgaaaaaaggagaagaggaagaacatcttttttttttctgattgcacgggcagccttaaaattatttttgaagtgtacaattcagtgtttttttagcatattcacagggttgtattatcatcaccatatttttggcctcttgaaaagaaatcctgtgcctattagcatccaattaccgttcctttgtagctaagtctcccccattccagctttaaacaatcacccatctactttctgtctctataaatttgtctcttttggacatttcacataaatgaaataatataatagggttttttgtgcctaaataagcttctaaagaagaataaggtaaggaatcatcattcagcaaatatttattaagacttgctttattttatacagtgtactaggagctggagatgaaaatatgtgtagaacatgaatcatatacttcgggaatttgtggactagtgggaaagattgacatatcaataacaaatcgaattagtgatgtaatagaggcatttttacaggagtaaaatgaggtagcatggactctatctgggtctgaataatgtgaggagtaacctccttacacaaagaggcacaaggctaatgtcctctgatggaatgattcaccatgcaattctaagggtgacaagaatgaaagttagggccttgaagaaatattttgattaagagctgccaataaagtagagtaaagattagattgatgtgaagaagtgggagattaatgagtaaatggtcactggcttgttgagaagattaaatgagatgtacatgtaatgtacctaacacaacgtcttgtacaaagtagccattcagtagagactagcttgtattatctccctttgaggtaaagaaaactgttagaaatagtatttctactactgatagtatttcttctacttatgcctccctttgaggtgaagaatactgttagaaaacatgacataggagaaatacccctgagagacagttcttattagtgactactgtgcagaaaagatggaggttggtgtaattaaggagaaggaaagccatgaagccaaagtattatgaaaaagcatcaatatgaattttcatgttgacaaagtggtataaaagataattataaagatggtcacttataaatacggtagttctgtgtgacacaatttacagaagttggtatatcgtgtggaagaaaacagcataagatcctgaaggtttgaactgtgggcacattggctccatgctcaggaaatggcaatggggttgggaagtgattccactttatgtccctttcagacacataaaaattacttgtgtgagtatcttatgccagacactattcactgtgtagtgagcatggtgggtatgaaatgacaactttattgtctttcctgtcaaagaacttgtaggctggttgggggaaagagaccatttcaatatgaagtgctgagctagaggtacccttagggcactacagaagcctagctgatggcttttagcctggctagacagttcaggatctctaaaagcaggtgccttgaaggctgagtcaaatacaaaaatgtattttggacagaggaaattgtatgaacagaaacacagaacatgaaactacttggttggtgcagggtatcatcagcatagaaccagacagaaccagagtgtaaataagccagaaggccatgtcatggaggccttgtataccagtctcaggaatttggttgtggagagctttcatcaggggaatgatgtaatcagcttggaaatgtagatatatcactgactgtgatagtgaggagcagaattaaggtggacgtgattagaagctttgtgaatagcagaaagaacatagattttgaaagctggcagacgtaggttactgaagaaagttacttaaccttgctatgtctttagttttatcctctgcaatatggggataatactgcctattttgtagagtcttgtggattcttctggcatatataatagaaaataaaacagctattattattattgttgatggtactatttgctatatctgactacaaggagaaagactaataggaaaccatttcaggaatccagatatggtcatgatggacaggaagagacaagagttacatagaggaattctgggaagataagaaatgtcatttttatgtactgtttgcatccatcagacaaggcatcaggaaaaatgatccttcaggaaagagtgattttttttcttcaagaaattagaagaggggagaaattggtttaagattaaggactccatgcataagagaaactgggagggaagacaggtagaaatgctatggggttaggaaggaagaatgcagaggtggattacttagaattgagacatctgatcaagacagagggatcacagcttttgctaacaaagtactagtggaggatgccactaggtgaggtttaataaataattgttgacaataagttccatttaaaaaataaacaatttatgcttcttctttgcctaagtgtcaaataaaacattcagatttttatttcaaagtatccctgagtccctgttcccttttttgtcctgctgacttttggaactgatttaggcttccttagtcatctcataatagaaaaaatcagccaggtatttcctacatttcttgtattttaaaaaaatgtaatggatgtaatgaattttaagcaaatgtaatgaatacaataagtaacttagtatatgctgttttcttctctatgctgaatgtttcatacatgttattttctatacaactacatggtcaattccttgaaaatatcaactccaaaatctttattttggtatactccacgtagcacattgagagagttttaaactcttgttggatgactgtttcaaaagtgttttgaagtaggcatgtcagttgcaaaaagtttgctcagcaaatgttgttctgtctcacagtctcagacattgagcagatgattacatgacagcacgtgattgctgggagtaacagacaaaagtaactgaaagtgctcggttatcttgacagtcaaaatcaaaagtgtcccctattttcagtgacctaagagtttctttttgtgtttttggtattgttgttaaataagtgttctcacctttgaaaaggtcaataagaattcaatacagtataatgtctgtgtgccaaatgaaggtgccccttatttttaagtgtggaggagttttgatcataagaacttgaaatacctacagaatccttgatggttaagcagctggtgccagcacaagaatccctcaatatgttctctatgaagccccgatcaccaaatgcaaacattcatgattcagtatattttcatcttgactgccaaagttgatctgtttcttaatatattacatctagacttggaactggagatgagaacagaatattatcttcctcatttttgtgtttttgttcaactctaatgtctgcaaagcacttgcgtatgtaatgatgctcagtgtcataggagcaggcaggtaagtgtaaatttgtctggataggagaaagcatgcacaacatatttcacatagttttctgatttcagtttgtttttgcaaattattcactcagtgagatagcttaaagacgttatcacagggaaaggcatggagatagttctgtgttgatagaaaacttgtaatgtacagccatgagtgagaagtcaggttcagattcttcaccttcagtcctcctctttcataaacagctccatgtcctattttacatatcctactttaaaacgagattatagaagaatgaatttctaggcaaagtgacacttattttaaaatactattacgtatccctgtgcccattaacttatcctaccatttttcttcccctgtgtccaaaccacctttagaatctcctaaatatttgtagctattgtaaacagcactggagactttgctagtttaaaaggagaaatcaacgcaattaagccctagttaatttacttatcccttatgagattataattgtattttgttattaaaagggggacagagtacactgttctcttgcctttttaatttccagactaccacttctcctgcacttgacaataccgcagtctaccacgtagtcccatggctgacaggaggagaattctaggcaggccagtgtttgagtagtgagtaattggactgtctttacccagcaactcactgttttgtaaatgtacctgagtttggagaagtaattggcttttataaggggtgcggggtggagggttggggtggggagagtgagaaggaggtcagagctttaggatatataattggtctccacaaagttgttgtgatacttttggaaccacgtaatggtcttcattaactaagtgtctgtcatgacagccattacatatgcattataataaaaatttatttacagtgtaagttgaagaaggtaaaatctggatgtagtttctaaactctgcttggcagttttcatatttaagccactagaagaaaaaaattgggagggaagctgagaagaatttactgaaagaaaaaaatacttgggagggaaattggcaagaagtatgaaaaagcttgggagggaagtaagcaaataaatgagttaatgactgttctggaaaataaactctatcatgcagatatcacatgactgattaaatttgaatttgacctcctgctttccaggtctggtaaaaactaacctgtaagaacttgaaacttagcctttgaatggtcaatccaccactgtaggagaatttatgaatgttcagttgagagaactgaaaataaagaagtaccataggaattaacatttgcattcagtagccaagatataatggacatctgaaacaggtatttgaggccaggcgtggtgtctcatgcctgtaataatagcactttgggaggccgaggtgggtggatcacaggaggccaggagttcaagaccagcctactaaaacacacacacacacacacacacacacacacacacacactagccaggcgtggtggtgcacgtttgtagtccaagctacttgggaggctgaggcatgagaatagcttgaacccagaaggcggaggttgctgtgagctgagattgcgccactgcactctagcctgggtgacagagtgagactctgtctcaaaaataaaataaaacatatatttgaaacacattgaattatgtcccttaaacaagaataaacatcactaaatgactgtaccttgaactacctgtaattttctcctgataggtaattaagcttcaaagtactgacacttatttactgtaatatgaagcaataacttaaaaaaaaaaaaaaactattgaaccagaaccaaacaggaatgccatagcattttgtaaactaaactgctatttcatttcatttgagccctggaacttgaaaataaatgctagctaacatctgtgaacagaacatacccatcagtactgtgctaagcacctttcatgaactggtcattaaatcctcactttccatttatttagtgacaacttcacccagagtttgcagtcaaagtgaaaatgtgctgaattccaaaagtgtgagctaggttttagaagttaatcacaattctggaacaaattactagcttaacaaatgagagttcttatgtctctaaaaccaaaatagccctaagtctgtccctcccagtaagatttgggccagtcaatggaacagtaatatacaaatataattacagctgtctaggagcaaactatcctatgaatagataataaaattaagacacttaagccatgttttcatattaaaacacaaagtaaaaaatcattgttttccaaagataaaagccatactgtatcatgacatatatatgcccgatgtttcgaccctcttgaagaattgagattctcgactctacactcttagcgttttctatattgaacagatgtttaatttaaggaggtcaagagaaatcttacacttattttttaatggtaccttagacatagaaggaacctcagaaatctctggctgaatatttccatctgcagatgatcatgtcattaggcttctgactctatagccatagaaaaatattcatgaagacctttcaggaagggaatgttggtatttctaaaaattgagtacaagtattctctagacaaaacagctcttgaaatggcagattgtattcccattattatatttcagaatcaagacattaatacctactttttatttaccaggtttagttatccttgaattagattttataaattaaagaaatagatttcaataaatatttgttgagttcctagtatggaaacatcgtgtttggcaccagggatgttgcctgcaagtataacaggagttcgtatttgtaatgagtttatgatttacagatatttggggggcaaagatatcattcggtaaatacttatgagtgcaaactttgaactagggactgggccaaactctaggaacatatttgatgacagagacacaatccctgtcctcaaggagctttcattctagtagagaagatgaaaaccagtacagtttggtaagttagatgatattggttaatgtagggttcttatgtaagtctagagaagtagcatttaatctgttcttagaaggtcaggaaagatttccctggaggaagtgacatttaagctgagagaggatggataaacaggagtcatctgagtgaacaacagggagaacattccagaaagagaacaaaatgtacgaggcctgatgccaagagagaacattcattgcattggggaactatagtcacttctgtgtggctgggatgtagaatgaaatgagcctggacccaagagagcactttgccctttggggaagctgtaggtattacagtaaggttggagtctggaaagaaaggggtatattgtgagatctgaattgggagaggacagttatatccagacctttatatgctccagtaagaagactgaactttacactgggggccatgggactcactgaatggcattaaatttgagagtggtcatatgaccagatttgcattttacaaagattgtcattgactgcaacatgaagtatggagtattggaggagcggtaaggctggtggcagggagataatttaggaggctttaggtgagggatgataatgacttgccaggtaggaaggagtaaatttcttctcagtggataattagaagattgaatggatggacttggtcactatttggtatagaaggggaaaaaagatgtcaaagatgatgccaatttttaaaaataatttaacatttatttttaaatattttttcagccttattaaggtataatggacaacaattgtaggtatatgtcatttacaacatgatgttttgatttatgtatacattgtgaaatgactgccatagtcaagctcattaacatatccatcactcacataattaacattttgtgtgtatgcagtgagaacatcaggctctactctcttagcaattttcaagtatagattacatttgttaccaactatagtggccacactatacaatagagctccaggacttattcatcctgcctaactaaaactttgtactctttgaccaacatcttcccattcgtctctcctccccatgccaagtttccatcttggtcagttgggtggatagtagtactatctgccgaggcaggttggtagggtgaaaacaatgtgttcccttttggaaatgctgaggtgaccagggaacttccaagggaatctgtctggatctagagcttagaagagatgtttgggctggaaacagacatcaggtattcttcagtatatgggttgtaaatgaagtcacaggagtgggtgatatcaccaatggtgagtgtagtataagaagactggactgaggacagatttccaaggaatttcaatacttaagaggtacgcagagaaaagaggggctgtgaaggacaccaaggaggagactaagagccaggagggaaaactttcaagagagtattgcattatggaagggaagaagagagaacattttaaatgatacgcaatgctcaataatggtatccgctttggagaggccaagtaagattcctaagtacccattggatcaaggtccttaatcttacaaaaacttatgcaaatcaataataaagagatgataacccgataatcaaaaatagacaaggcatataagaagaaaatgaattaaaaatattcaaagcattcaacatatacaaatgcgctcaatctgatatataatgaaagaaaagtaaattaaaacaacaatgggcatgactaaataacagtatgagggagcctgaggagaaggagcatttgaaatttcagtacagaagagaaaaggggtgacttatagaaaaaggagacagaaaccatagaacatgtttggaggataagactcaaacaggtagtggggacccttttctagagtaggatgaaaacaggtaatgtgtgtggatgcaaatatgaggtaggatgtaatgggaagttgagcgaattcatatttagtcattcattcaaaaatacttaattgagttactgctgtgtggcaagcatcattctacaaacagagggcacagtgataagcaagccagtttgtactctcgtgtaacttacattctactttgagaagacagattataaataggttaaaaagtcaataatatgatgtttcagcatcaacaataaaaaattagggtgatatatagagtgccagggaaagtgctttcatggacctcttcattctctcctctcctggtgtcataagctactccttcatccatgctgccatttctcttggtttacggttccagtatagtactcatcacattattactatagagccatccaccttatgaaggtgaaggtgtccatctccttacttaaaaaaaaaaaaaacaaacaaaaaaacaaaaaacccgaaaaacaaaaaaagaggcagaaagacagaaggtcctccactaactttcacgtgccatgtaaccagcgaaatccaattattttacagcattctagctatagaagagtttgggaagcgtagtgcttagtgttctagcctttgtagcacaggaaagggcctggaaggaaaggaattgtgtcttccgcagttgcttttctttatggggaagtgctatagcccaaacaatattttaggaattttcatctattgtcaatatgcaaactggaaggggataatgaaaatgttgtggttagaagtttatgaaatattgttattcacattttaaagtaaaaagagggaatgtttaagagacttgtttaagatcacatgtctcataattggtgggaccagcaatacaatccaaatctaactacttatctttttgctatgccctattagtgttcatattagaaaagaaattctatctcagacactaatgatttgttctttggacaccaatgactttaagttaaaacttcatactagttaatttaattatggtgtagcagtattattaaactatcaagactataaattttctatttgtaaaggagattatgataccaaagattagtgaactaatgatattgagaattctatgacataattttgaaaaatatttgcaggatatttatttttgtgtaaatgatgctttcaagctaccataatcctaagtaagtgtatatttgggaaaaccacctattctaacacacttgaaatttaaataagtcaggaaatttttttccagatcttctcccaaattatcttcatctttttcctctccccttgggaaagaatctcttcatgcctcataatatcaaatttaaactatggaagtccaggtggtggacagtcagcaaaggggaagatgagaagcttgtgttataaagccagctcttgtcagaataaggatctggtaggaacttcagaagtgatgggtaggtaagtatgaaggccaggtcctaagatctaaattacaaagcagaagacttacttaccagggagctggaaaacatgttaggaaatccagagcaggaacagatttcaagatagcacaataatatagcagtgaagtactgagaaaagagtttttttcacgggttggatttattctagcattttaggcagcatttgggcatttctaagtggtcagacttagaggagatagttaaggaattagcagctgctaaatgccaattcttagaccagttgaatcaaaatcatctaaaaagctttcagaaaccagactttttaagggccatttgagagactctcaaatctggaatccagaaatctatagctagatgagtttaaggtagagccagaataagaaaaataaaatagtttgtttgtttcaggtatcttttccaatattatttccgaacctaccccaaacaccttaaatcactgcattctatagccattcttttaaaaatgcttgagttattagttttcaaaaacaaatacaaatctgcacacatacagaaataaacattaaagagacataaagatattaaacagagttacatatacttacaacttcatacatatatattatatataaaactgaatattaagtgtttgatattagtgacaaaatctgtaacatccattatattagtgctttttgtactttttgttgggtgtagtaaaaattgcattcgaatttgagttttctgctatatatttggtcagttcctatcagtgaaggaaaaacctttttttattattttattgtttttttattttttgagacggagtcctgctctgttgtccaggctggagtgcagtggcatgatcttggctcactccaacctctgcctcccgggttcaagcgattctcctgcctcagcctcctgagtagctgggactacaggcacctgccaccaggtccagctaatttttgtatttttagtagaaatggggttttgccatgttggccaagttggtctggaactcctgacctcaggtgatctgcctggcttggcctcccaaagtgctggaattacaggtgtaagtcaccacgcctggcccctttttattttttaagctgattgaagattcttagttctcatgctttctagtggtgattaatctttagccaatatttctatatacagttattagtaatcatgtttgacttaggtcaacaaacaatctttcctaaaaaaacagaaccccaattttaatttctgaattatttagtatctattttctgctgtggaagttgaattatgttgatagatatcatacagggccatgtaacactctcagatacacgttcacatgtatagtagctgtatacaaaaatgttacttcattctctctctctttataatactcttggctctcttacgttctctcacacactctactcttcccttcctctgttctttctacttgttccctctgctcctaccacacttattccccccttgtccattttccttgtgcataaagcacaagtgcttagtaattatcaaatattaataacaatgacactaaccacccaatgatttagtgttaatgacatgctttattgaatggcattacctctaaagttcatgtttcctttacccaaccaagcttcttaccctcctcccttaccacaagcatctatattgtcaaggttgttataaagagtaataagccagccattaaaaaagggtttatggtattttcctatctacaaagtcacaggaagctcaaatgtactcagtaaatattgcaaaattacacaggaccattaaatgtaacactccaccctttctctctctctctctctctcttgctctctctctctctttctgtcaatatagcaacaccctatatcattgccctttgtatgtgcaaatcagagttaataagctttatattagcaattactccttaacaacttctggtttgtttggtccagttgaataatgtaagcacttaaaaaaatgaaattataaacatttatgtgaaaagtgcatatatcacattggatatgttgttatgcactccttaataataaagtaagttaatctttattgcacacttattataatattactttgaccctctctagtactctttatctaagtattctcaagtgctttacaatctcaaacagacccaatgtgttgtatacacagaatcctttgaagctgacatttgcctttctgaccagcttgttgtaaaggaaatcagccaaaaaacaagtatctagatgagtagctcaaacattagtacacatagtaatcacaggtcaaaatgcagatagattaccctgtccaaattctcctgagtaagagtaggtgaaacatttttaaataagctccccaggtgattctgaaattggtccaaggaccacatattaagaactaatgatccaaacaatttgactttttattgtagattaaaccatgctgagaaaattattaaaaattgaaatggcagtggaggatggtttgaaagaaaggtttttcagggccctttcaacaataaaattaattgaacacaatattaaaactctatatttgatttaagactaaggttttcattgtttttaaatctcagtaatttttatgtaacaggtcaattcatacccagcatcttaattccaatgaatgatttcccacaacaatttttgtggataactccaagggaactcgaaggaagttgtagtatgaacaaagagaagtagaatttgtccctgtgtgtaaggcttctctgataagcagcacaggctctcatactgctttttaaaaaaattatgatagcatcaagtggaattaattttttttagattatactttcatggaagggaagatctactgtgaaggctggaaaaccaacacccttaagataaatatattaccagatttgagcgctcttagtaatcagcaaagataaatgtttaacagtgcatacaaaatgaagtgttttatgttaaatcaaatagagaaagccaaacactaataatgtggttacaaatgaacaataaattaggtaatcagaacaggtacagacattaatagcaggatattggtattattaatgtattttgttttaaaataatgaacttaattacaattctcctcatcctaccccactattttattttattccagattcagcagcttcatattatgtctctgaaacacttattattaaagttatccaaatgtacacatttctctttatataaatgtttcagtccagaaaaggaggccaaatacattagctcagaacatcaaatcttctcagatgtgggaatcttttattttcacacttttaaaggtaatctgtatttctagcgtctattatagacagaaaactttcatatgacaacattcctattttcttaactgccttgataggggcgaagacaaattctaagtaggactttttaccccattcttcttaccatcattctttcacaaaacccccagctttagacaatcgctattatgaatttgacatgtactattccaatccattcccataaatttacacccatatatacatatagttatctatgaacaatatttagtagcttttttgtgtgtggctttaaaatttacataaattgtataatttgtgcacattcttctttaatttgccttcttggctacggttatctttttgagatctagctatgctgctggtatgtagaattctatttcattcttttttcattgttgttttgtacccataacgtgtcacattttatttataccttctgttcctgatggacatttagattcttccaggattttactcaatactgcaatgaaaatctttgaatttttctcttttgcacatattcaagagacttttctgacatatatatctataggtgaattgtgtagtcatatgatacatacacacattttaaatttcactagatactgccaatttgccctttgaaatagccatacaatttatagtaccaccagccacttatgaaagttcccatttcctcaaatctttgaaagttcttattataaacagacatattaattcttgccattctgatttgtaaatcagaatctctattgttctacctctagttctaatttggaattccccaattacttgtaagatgctatatattttcatgtttgttagtcattctgatttcatatcctttaccaattatctttttggtaagttattgtggtggccatgagatgtgccttacagaggccttgctagagggaatgtgattgaatgagagccccagatgctgtgtattaaaatcctgcactgagtttgtctcaagatttcttgcacgtgaatgaatgagtacagctgggatactaaagcagatgtgtatttgggagatatgagacttctttagtggctgatttttggctcataaatgactttgccaaaccttccttagactgctcagtgttctaacatcttccatccagccttctacccttctttcctttactaggggattgaatttacattgaggtctcatagccttctctgcctctctccttatttccttttatacaaatatttcccctaataaatccatgcacatttaataccattttgctatttgcaacctgcaggtcctggactaacacagttctatacattgcattaccattctctagagtgggatcttttgttgtagagagttttaaaatttttatgtagtcacttttatccatatttttctttatggtttatatttttgtgtcttctctttaacacatcttttctagcagaattcataaatatattattctatattgccaaaagtttgaaagttgcaatcattagaattaatttttgtatattgtgtaagttaagaatctaattttattgtttttcattggaaagccatttgtcccaagataattttttagtagtccctccttcccctattgtcattctgacatattttttctaggttccgatctatgcatgtgtttctttatggaagagttggccctttgtatctttgagtttcaaatccatggattcaatcaaccacagatagaaaatatttagaaaagcgtcagaattgaacatgtacatacattttgcttgtcattattccctaaacaatatagtataacaactatttatgtaggatttacattgtattaggtattgtaagtaatctagagatgatttaaagtatacaggaagatgtgcatatgttacatgcaaatactaccccatttatataagggtcttgagcattcatggattttggtatccacagagagtcctggaaccaattccccacagatgccaaggcacaactgtatttattctatcatctacttgtttaatctcacatcagtatctacttttgaaataacaataactttattatttaactttttttattacttaggattagagaatttcctctggtgaggcatcatagtgtctcaagctggccataaagacaagtgagggctaggatcggtaagactgggcagaggaagatacaacagatctcctatgcatgaagcaaaagtgcagctcagaagccagctctttcattaagttgtcctctataccctcactagattgtaagctcttgaaatgagaggctataccttaattgtctctgttatctaaaatacttccactcactgcttggaacatattgcctgcaataattaagcttgccctggctcccaaagcatagagcaaatcacactcctccccttgcctttgagaagctcacagtcttcgaaggtagagatatgtgaacagataagaaaatggatgacaggagaacagaaacgcatgactgtcagagaagtcattggagactttacagaggaaattaaatttttattgatcttgaaagagtttgccagatgaagtagaggacaggcattttagacaaagggaacaggaaatgtgaaaacacaaagtgatggaagtcatggtgagtttggagaactataaaacttcaatgtggctgaagggtaaggtggatatagaggagtgctgggaggtgaggctgaagaaataagctaggaaatgtctttttatgccattttttaaagtttggactttattctgaagttcacatggatccaatattttttgttttgtgttgttttaagcagaagcgtgacatgatcagcttgaatgatgaacaacttgaattgtttaaagtggatcacacagtctactgttttacagttattctttgaccaagatattctttattaactgaggaaaaaaagggctttcctgaattttgcagtcatgggatatatgataagcattcttgatttatcatcttcaatcctgttacataacataataaccattgttattacctttagcaatgctttcctcagtattatctaatggcctataaaatgtgactttcatttgcaaatacagtacatctaacaagaatttaccacagctgctatgcaaaataccaatacaattgacccttggacaatgtgggggttaggggtgctgattccccatgcagttgaacatgttacataacataatacataaccattgttattatgtaacaggattgaaaatgataaatctttggaaagtggggcaaatgaattcttatgaattccatatcttccacatgtgttttacttttttgataagaagtagtaacctagttcagaaagaaaataatcatccccttttacttatgcaggataccaagtctatcttagcaccataatagtgaatgataggaatcaagctctatgaatacattcacatgtacatatatatggctatataggacacatgcatgcacatatacatatatacacttgcatatatgtgtatatacatgtacatatatgcatgtatattcaattgtatatgtgtatatagccaagttattgtacagttgacctttgaacaacacgggtttgaactatgcaggtccacttacacgtattttttttttccgtttctgacacccctaaggcaacaaggccaactcctccccttgctcttcctcctcagctgactcaacatgaaaactatgaggacgaagacctttatgaagattcacctccacttaatgaatagtacatacatttctttttccccatggttttcttaataacattttcttttctctagcttgctttattgtaataatatagtatataatacatataacataccaagtatgtgttaattgactgcttatgttatcagtaaggcttctggtcaacagtagactattgctagttaagtttctggtagttacaagttatatgtgggtgttcgactgcatggggagtcagcaccccaaccctcatgttgtccaagggcgttgtccaagggtcagttgtaattggtattttggatagcagctgtggtaaattctggttagatgtactatatttataaatgaaactcacattttataggccattaaatattattgaggagagcatttctaagggtaaaatcttgtctaatgcttgaaacatcttcattttcctgtcagtttagatctttttgaagtaattctgaaaatctctcttttaagctaaatttaacacaaccaaatagccaaatatttaagttccactaatgaagatatctaaatttctgttaaaaatttaagatatatgttaaacccttctaatataactcttctctcagtcaaacttttttttttaacagttgctttgcttcttctttcaaagtcatacttcaacaaagttgctattgaatatgtctgactaaacatgttagctatatgataagatggctggataagagataaatatagaaaatgtagctttttttctacttgcaataaccctttaggaattaaaatggaaaactaataactatttgattcataatagtagcaaaccgtaaaatatttagacataaatctactaagaaatttataagacatatatggagaaaattcaattgaataaaccgttattgaagtatataaaataagatctggatgaatagaaagatcataatttttaataaaattttgcatcttaaaaagtgaaccctctccaaatatatgcacatttaataaaattataaatacatcccaatgaggttggttttgaaattttgttaattggaacttaaatttcacctaagaagaaaaaataaagaatagttaagagtgcatgctttgtagacaaattgccttagttagaatcctggctctatcatctattagctatgttatctttgggataacattcatcttttcttatagatatgcttaaaacagtgcctgacatatagtaagcacaaatatccattagctattcttcttattatttatgttattagtattgttaatatttgttattatatggaagactaaatgaccaaagagagtcaagaaatttatgaataagatttatgcgttgttagatattagagccattaaaaaaaaaaaaaccaaagtgccaaaaaacctagcacagtgttaatacaggaataaaaaaatggatcagaggaaccaaacagaaaagccagaaatggatcttaggaaacatgagaatatgatatatgatagatgctaaatgaattcagtataaaaatattaatgtaataaatcatgcttgctattcaagtaaaagaaaatgaggttagattcatgtctcataccaaatataaccataaattataccttgattaaattttttaattaaaaagcaataatatttgaaaagaaatataggatactcaatgtataacctgaaggttgggtagtacttttcaacaaatataggaatttttcacttgaaatactagaagaaaaaaagatagcaaacaaatacaggaattccaatttcaagcagatataatgatttcatgaaatgttaactgtgcacatgatagatggtctatggatagtgcaaaagaaaaagagaaaagaaaaaatgttttttaacatatgcagcaaaaaaggtttttaacatctattacatacaaataaaaatgaatgtataacacagacttcaataaaaataggcatttcacaggagaacaattcagatggccagtatttacaatttcataggtattaaggaaaatacaaattaaaatggcaaattagcaaaaattgaggtgtgattatattaatatctgttggtggtggtgattatggggaaaagggtactttcaaaacttgctaatataaatataattcttttggttgttttgtaaaggaacctgacaatatcttttaaaaataaagaaaacgcatacttttgacctagccatcccattcatgagggtatgtcttagaaaaataagatcacaaaatcatagagatttatgtgcaatgatattattggtaggtcatttttatgaggaggggtgtggatagtaaatgccagggtaaatcacatagcatctaataaacgtatttatgaactacaaaagcttacactttcagtctagtctagtccagactgcaaataaatgtgagcaagtgaattcaagcacagaagtgcttgaaggcaggtttcataaatctactttcttacagtatcctgatattgacttatcgagacagttactgtggggttgattattaaaatatttatgtatctaggtatttttcattcagtagtatgttattcaattagcaacaagtgtggggatttaaagatattcttgtttgtttttactgctgaaacatattctagtggaaatttcgaataaacgattagtcatcctaaaagcaagatacattttctcagaaaagacaaggtaaagaacttgtatatcctccctcaattcgtttataaggtaataagatgaataaaaatatcatagtacaatttagcattgtaaaataaaattaattggtcatctctagtgtggtcgtgcttggaaggtgaaagaagccaagatcttgtctgggaatatcatgtctaccttgacctcacccttaagaatcctagcctttagtttaaaatcacatggctacatacataccaacttcaacaatagtacatctggcaaggtcatgcaaacctgggacttgagcttctgattctaagtccagtgctttttgtgtacatcatctcttgtacataccttatgatgatatgctaataaaagctacgtgatcaggccttaaaaatctgctttttttttgtaatggtagaatggggcatattatcacatcaggtaaacactctattcaaggataaatggaaatgaatgtcatatatagatcattgataaatatctcattacaaaattatgagagttaccaatgtttgagtgtatattatgggccagccctttatattaaattacttcaaatttttacaactgttaaaggaagatattattatacccattttatagatggacaagttagggccagaaaagacttcctcaaagctgttagtccagtaatggagacagggctagaaaacaggtcattttgctctttgactaatgttactactcatgttttgtattttgtttaaagttttattttattttgctttatttattttttgagacaagatcttactctgtcacccaggctggagtgcaatggagtgatcacggttcattgcagccttgacctcctgggctcaagcgatcctcccacctctcaatctccagagtagctaggactactacaggtgtgtgccaccatacctggctaaattttgcattttttgtggggacagggtttcactatgttgcccaggctggtcttgaactcctgggctccagcgattcacctgccttgacctcccaaagtgccagtatcacaggcttgagccaccatgtccagccaagttttattttagaattaaaaaaaattccacttggattgttacattttatctcattgctttatatttatagaattactttataaatgccactttcttaattttcatagttagcactctttatgaaacataaactattatttgacccaggtttttgttagaggaattgagtcagagagctgttaagtaactgagatttcacaataagccagacagaccagggttcaaattctgggtctcacattatccaattcaatattccagctttgttacttattgagcaaccactacaagcacagtttacatgacatctgatagctctcaaaatgaattttacaaacataattcagatttcaactcagcagtgactcaggagaaaggacacttggatgcatttctttatggcatttttcccagggtacacgcaacctggaagatctcccaagtatgggggaaggtttcaccctgaggaatcccattccctctaatctgggacaagggggaggagagtactgtctcttatcagccatctccccagggaggcctgggccctcctggaatgcataccatggcttactgactcaaagtgttgaaaagaccaggcattgggacacacaacactactcttaaaataaaaaaagaatcagagtagcttgtggttataattgaaatggacagagtaacatggtaccaagaaactattagcaattccttccctaaatccctcattttcttaaagcattttctccttttcctcaacaagctttaagttggatttgaagaatgataagactaaaaggagggctgtttctggtctttggaggaatttgatattccattcgatctgagtgtgcaaagcctgagttcacatgaactcttctgatctctttctctaatattttttcaccttattcatatgggaaagaaggaggggaatactttagttccattctccctcctcctatttccttgacttgtttaaaatataaatgttatagacacctaagatagaaatttgactgaaacagcctcttaattattgtcttaaaaaattggtataatgaaattgcatttgtagtctttggacatttaaatccagaagggatattttctttttcttttttaaaaatttaattcaatagtttttgggctacaggtggtttttggttacatggataagtgctttagtggtgatttctgagattttgatatacccatcacctgagcagtgtgcactgtacccaatatgtagtcttttatcccccccccgctccacccttcctttatcgtccccaaagcacattatataattattatgcctttgcagcctcatcgcttagctcccacttgtaagtgagaacatgcgatatttggttttccattcctgagttacttcatttagaataaattgtctctagctccattcaagttgctgcaaaggccattatttcattccgttttttggctgaatagtattccatagtgtatatatgccacattttctttatccacttgttgattgataggcatttaggttggacccatattttcgcaattatgaattgtactgctgtaaacatgagtgtgctttttttttttccatataatgacttcttttcctttgggtagatacccagcagtgggactgctggatcgaatggtagttctccttttagttctttaaggaatctccatactgttttccacagtggttgtactagtttacaaccccaccagcagtgtaaaactgttccattttcagcacatccatgccaacatctattattttttgactttttaattgtggctattcttgcaggagtaagatggtatctcattgtggttttaatttgcatttccctgataatcagtgatgttgagcattttttcctgtgtttgttatttgtttgtatatcttgagaattatctattctgtcctttgcccactttttgatggaattatttgtttttttttcttgctgatttgtttgagttccttgtagatcctggatactagtcctttatcggatgcatagtttatgaatattctttcccactctgtaggttgtctgtttaccatgctaattatttattttgctgtgcaaaagcttttcagtttaattatttcccatctatttatttttgtttctgttttatttgcttttgggatcttagtcatgaactttttacctaaaccaatgactataagagtttttccaatgttatcttctagaatgcttatgttttctggtcttagatttaagtctttgattcatcttgagttaatttttgtataaggtgagcattgaggatccagtttcattcttctacatgtggcttgccagttttcccagcaccatttattagatagggtatcctgtccccactttatgtttttgtatgctttgtcaaagatcagttgactttaagtatttggctttatttctgggttctctattctgttccattgtctacttgcctatttgtgtaccagtaccaggctgttttagtaactatagccttgtagtataatttgaagtcgggtaatatgatgcctccagatttgttctttttgcttagtattcctttagctatgtgggctcttttttagttccatatgaattttaggatttttttctagttctgtgaagaattatgatgatattttgatgggaattgtattgaatttgtagattgcttttggcagtatggtcattttcatagtattgattctacccatccatgagcatgggatgtgtttccatttgtttgtgtcacctgtgatttctttgagcagcattttgtagttttccttgtagagatctttaacctccttggttaagtatattttcatgtattttagtttttttttgtttgtttgttttgttttgttttgtttttgcagctgttgtaaaagggattgagttcttgatttgattctcagcttggttgttgtcagcagggacattttctaaagtatagactgtagttccttatcttctatctgtttcttactgtccccttcagtattcttgtccttttttcccgctattatctttttgaccttttaatatatagatatctacttctacttctgacaatttttgcttctccaattttctttctttttctcctctgcacacatttatttattttcttctatgtacttctttatttttaacttaatatttgattaacttcccttccctgtctcttttccttctttccataaatcttcattaattgcctgcactgagctaggattctatactctctaaatcaataatctattttctatagtcaactgtgttataatcgtactgtcaagataactacttatttttaatacttaaaaatattttgaaattttaaccaatttaattaatacaatgttgagttcaaatttgaaaaaaacaatggaaaactgtaataattctagcaacctcctgctttttaataatgtattagaaaatttgcctctttttcaaaagcctacagtgaatctattcatacaaggcaaaagcaaaccattctcttcattctctttttttctccaaaagatttaagtgttttttgtttgtttgttttgttttgttttttagatattgagtcttgctctgtcatccaggctgcagtgcagtggtgtgatcatagctcgctatagcctcgaattcctgggttcaagcaatcctcctccctcaccctcctgagtagctggggctacaggtgcatgctaccatgcccagctaatttaaaaggaaaaaaattgtgtagagatgggtcttgctatgttgcccaggctggtctcaaacttccaatctcaagcatttctcccacccagcatcctgaagtgctgagattataagtgagccactatgcccaaccagatttagtttttaaaaagagaatacgatttgaaaaaggaaaaatgtgaggcaggagagaagaaatacacacacgagctgttttgtaattgctgtaaaactgaaatcttcagcctcactaaaggagcacttgcatgaacacctctaaattaccttattaccttctaaattaggtgtgaagtctaacttctaaattatgagtgaaatccactgcaattcttgttatttggatggaatcctaggtatgtggtccagttcatgagttgaacaaaagcatgctcatttaggccaggtagaaagaaataaagacctatgttttacatgtctcataaccactgaaggtccttctcataagcagtgcttatgggtattaacgacctctctatattttacttctccagtgcctaagtagccgagtccactgagtcctgctacatctcctccaacatgtcagcatttttttcacaggccttttgttactctagatcagaaatgttgatagcaacagttccttgagggcagcagctagcatgatgccagccaacaggaaccaccaaatggttcttaatataaattactacttattaatctatttactttgtgcatttggagttttgcatgtaaagtcctatttatgtccatatggtagataaatggaacaaatgaataacagaagtaaccattttgatactttagatatagataatattggattatttctggattgtgaaagaagaaggaagaagcatatggaagagaagttttagtagaggggaggaaggaggaggtggaaacgaatgtacaaggatgggaggagaaaagggagagagacttttttttttttaaggcgagagtttactacctatctaactcttcgcattcttgaagtctcagaccaaatcccatcggtttgaaagcctctagggtattctatctattgtatacttctgttatgtacaaaattaatttgccaattaattgtgaactgttttataaactatcttaaaatggttagttaaatctttgggatagtatttagctttctccaggattatgacttaccttctaaattagacatacaatgcctaggagtcaaggactattttgcataaattccagtcttcttttacaatgcctagaatgattgttaccacagaaatattcattacctgggagaaaggatgacaggaggggcagaatgaatggagagaggtcgtgagaatgaggtgctgaggatggacgaggaagaaagctgttttagttgggaggataggtgacagaagcatggaaaggaattgccttggacccatggaagcccagtgaagatacttagatcctgcaggggtgtgaataatgttcttttagtttctcttcttaggaggtttgttcattttgggagatttcttttgaaaagagtgaacttaaattggagaaaagtacattttagtatgttgataacatttgaatttgtaaaatggacctatggatgatctacacatatttatatacccataaatatacacatattttaatttttggtattttataattattatttaatgatcattcatgacattttaaaaattacagaaaaatttacatctaaaatttcagcaatgttgtttttgaccaactaaataaattgcatttgaaataatggagatgcaatgttcaaaatttcaactgtggttaaagcaatagtgtgatatatgattacattagaaggaagatgtgcctttcaaattcagattgagcatactaaaagtgactctctaattttctatttttggtaataggacatctccaagtttgcagagaaagacaatatagttcttggagaaggtggaatcacactgagtggaggtcaacgagcaagaatttctttagcaaggtgaataactaattattggtctagcaagcatttgctgtaaatgtcattcatgtaaaaaaattacagacatttctctattgctttatattctgtttctggaattgaaaaaatcctggggttttatggctagtgggttaagaatcacatttaagaactataaataatggtatagtatccagatttggtagagattatggttactcagaatctgtgcccgtatcttggtgtcagtgtatttgtttgcctcatagtatagtttactacaaatggaaaactctaggattctgcataatactggacagagaagatgtaaatatctgttagttccatcatagaccctgccactccaatgtacacaccagctttaggcttcttggtatagataaacatacattttcaaaatttttcatcataattttcataacaaaataggaaggcaaatgatgtcacttggcttaaaatctataatatttaaaataaacaggacaaatgcattaacattgttgggggaggaggtcccttagtagaaacactcttggtccaagcattttaaagctgtcaaagagatgtaaatatagataatgtatgtcaaggagagagctttgtggttaaactgtaactttcagtttaaacaattattggtgactctgatgtcaaatgtttctcaagctttatctgaacaaaattcttctcactttgttgccaaagtcgttaacaagaaatcacattgactcattgatgttttggctcctttcccttactttctgttgctttccaaaagctgagacaggaaactaaccctaactgagcacctgcaattgcctggtagtattctagtcatgtgtgtacttttgtgtgtatgtaatccccttacagctctgcaaagtaagaattgttctccctgctttacagaagagatcataagataattgaggctgttagatgttaacttgccaaaagccatacaggaaaatggtagagtcacagtttgaaccaggtccttttgattctttacattaaaccatgctttgatcttggaaatacactgtaaggcaataaatcaatagatacggataattcacaggcttctaaataaatggaagttgattgtttttatctgtgagccaaagtaagacttattctaagaattccacaaatttagataagatagagtatatggcttctagacatccaacatagaactgagtttgtgttatcagtttaagatttggttttgctgtaaggtgcacacactttgaggaactaaaaataattgtctgttcttattctgatcagaatgtgtaatgtgttgtccagttttggatgatgaatttcttatttctaatctcataagaaacttgtcatagatgtgagggagagaattaagaacagagtgtggggaagaaactgtgtacattttgatgggatccattatgtagctcttgcatactgtcttcaaaaataagttacactataaaggttgttttagacttttaaagttttgccattggtttttaaaaaaatttttaaattggctttaaaaatttcttaattgtgtgctgaatacaattttctttattacagaagtaccaacaattacatgtataaacagagaatcctatgtacttgagatataagtaaggttactatcaatcacacctgaaaaatttaaatgttatgaagaaattatctcatttctattaatatgggaactgtgtcttcatctttattactgttctaaggtcaactcaatgtagattttacttgcttatggtttcatattttagctaaatagtaaaataatatggatatacattttgttgtgacttactcatactttccttatttggaacttttatgaatatgatatagagactgaaactacaaggaacaaaatgcaatatcaattatacagttgtggcagcactgctgtcaatttgttgatagtgtttaacacttagaaaaacattttaaaaataatttcacataagtaatgtaatttattagctgtctctgacattttacagtttggaatagtttattttctttttggtgtcctcaccaaaacccaacatcttcaagggcaggaactgtataatttttgctattgtattttgagcacatagcatggtacttgcctctaaatagatactattgttaaaatattttttaaggtaatattttaaagtgtatgctatggtacagttcagtttgtgacttttgctagtttatgccacttacagttagcaaaatcacttcagcagttcttggaatgttgtgaaaagtgataaaaatcttctgcaacttattcctttattcctcatttaaaataatctaccatagtaaaaacatgtataaaagtgctacttctgcaccacttttgagaatagtgttatttcagtgaatcgatgtggtgaccatattgtaatgcatgtagtgaactgtttaaggcaaatcatctacactagatgaccaggaaatagagaggaaatgtaatttaatttccattttctttttagagcagtatacaaagatgctgatttgtatttattagactctccttttggatacctagatgttttaacagaaaaagaaatatttgaaaggtatgttctttgaataccttacttataatgctcatgctaaaataaaagaaagacagactgtcccatcatagattgcattttacctcttgagaaatatgttcaccattgttggtatggcagaatgtagcatggtattaactcaaatctgatctgccctactgggccaggattcaagattacttccattaaaaccttttctcaccgcctcatgctaaaccagtttctctcattgctatactgttatagcaattgctatctatgtagtttttgcagtatcattgccttgtgatatatattactttaattattattatacttaacatttttatttactttttgtgttagtattttattctgtcttctccttagatagtaaccttcttaagaaaatatatatgctaagtgttttactggtttaatatgcttagactactcatctacctcaatacttccttggagatctcctcctcagtcacacagagctcaggacttatatttccttggaactcctgttagggtccaatgtacatgaaattccctagacagacagacagtcagttatatggcttgatttcaaagtttcaaaatgatttaatggactatcaagtagtttattaggagaacagttattatactcttctaaaaataaagactttaagcaataaagatgtatatgtatataaaatggctgggttattcctagaagtacctttcttagaatttagttaaatttaatatccaagatactatcttttcaaccctgagattgtgaaaagtaacttctatcaatataaactttactacatttgtattgtgttagtgtgttacagtataatctagaacaatgtgtctttctatatgatatatgacattttaatgcctaaaaaaactgatatgtcttagatgattctagtcaggatttacttctagaatagattaaaattctatttgaggagagtcaaattaattatcgaattctcagttgttattattgctgttttatttttagtgaaacagattagtcttaatgtaaacacttgagaaataaattgatggtcaacctaaaatgtaaaaaagaaattaatagaaaatttaaagagcaacaaagctctgacatttaaaagaaatgaagtacaaatctctagggaccttaaagatcatctaataatttcctcattttctagataaataaactgagagaccccgaggataaatgatttgctcaaagtcaaatatctacttaatataggaaatttaatttcattctcagtctgttaacatgcaacttttcaatatagcatgttatttcatgctatcagaattcacaaggtaccaatttaattactacagagtacttatagaatcatttaaaatataataaaattgtatgatagagattatatgcaataaaacattaacaaaatgctaaaatacgagacatattgcaataaagtatttataaaattgatatttatatgtttttatatcttaaagctgtgtctgtaaactgatggctaacaaaactaggattttggtcacttctaaaatggaacatttaaagaaagctgacaaaatattaattttgcatgaaggtagcagctatttttatgggacattttcagaactccaaaatctacagccagactttagctcaaaactcatgggatgtgattctttcgaccaatttagtgcagaaagaagaaattcaatcctaactgagaccttacaccgtttctcattagaaggagatgctcctgtctcctggacagaaacaaaaaaacaatcttttaaacagactggagagtttggggaaaaaaggaagaattctattctcaatccaatcaactctatacgaaaattttccattgtgcaaaagactcccttacaaatgaatggcatcgaagaggattctgatgagcctttagagagaaggctgtccttagtaccagattctgagcagggagaggcgatactgcctcgcatcagcgtgatcagcactggccccacgcttcaggcacgaaggaggcagtctgtcctgaacctgatgacacactcagttaaccaaggtcagaacattcaccgaaagacaacagcatccacacgaaaagtgtcactggcccctcaggcaaacttgactgaactggatatatattcaagaaggttatctcaagaaactggcttggaaataagtgaagaaattaacgaagaagacttaaaggtaggtatacatcgcttgggggtatttcaccccacagaatgcaattgagtagaatgcaatatgtagcatgtaacaaaatttactaaaatcataggattaggataaggtgtatcttaaaactcagaaagtatgaagttcattaattatacaagcaacgttaaaatgtaaaataacaaatgatttctttttgcaatggacatatctcttcccataaaatgggaaaggatttagtttttggtcctctactaagccagtgataactgtgactataagttagaaagcatttgctttattaccatcttgaaccctctgtgggaagaggtgcagtataaataactgtataaataaatagtagctttcattatttatagctcgcaaaataatctgtatggaagtagcatatataaggtatataaacatttagcctcttgataggactaactcacattctggtttgtatatcagtcttgcctgaatttagctagtgtgggcttttttttatcttgtgagtttgctttatacattgggtttctgaaaagatttcttttagagaatgtatataagcttaacatgtactagtgccaatcttcagacagaaattttgttctattaggttttaagaataaaagcattttatttttaaaacaggaaataatataaaaaggagagtttttgttgttttagtagaaaacttaatgccttggatgaaatgagccatgggcagggttgtaatgaattgatatgtttaatagtatagatcatttgtgaataatatgacctttgacaagacacaagccattaacatctgtaggcagaagtttccttctttgtaaaatgagggaataaaatagatccctaaagtgtgtaattttagtatttctaaactttatgaaggtttcctaaatgataattcatctatatagtgtttttttgtgtgtttgtttgtttgtttgtttgagatggagtctcgctctgtcacctaggctggagtgcaatggtgcaacctcggctcactgcaacctctgcctcctgggttcaagctaatctcctgcctcagcctcctgagtagctgagattacaggcatgcaccaccatgccgagctaatttttgtatttttagtagagaaggggtttcatcatgttgaccaggctggtcttgaactcctgaccttgtgatccacccacctcagcctcccaaagtgctggtattacaggcgtgtgccaccacgtccagcctgagccactgcgcccagcccatctatatagtttaatatcaatctaaatgaatttctcagtcctgagcctaaaaatttagttgtaaagaatgatatccttgactaataatagtttctattaatggattgcatctagtgctaggtggcatatatttagtccccacaactaccctggaaggtatttaaaatttttcacatttgcagataaggaaactaaagttcagagttcagcaacatgcttgaattcaagcagctcctaggatgttaatggtggaggttgggttcaaatccagatctgtctgactcaaaaaatgcatactcctaaccagtgcactatatcccaattccataggagcccttctttgtgattcatagcactttcccatgagttttgttgattttgtgagaaacaaaactctttttcctttggactgtctggaatctctctttttcaaatttttgaaatgtatttctatgccaaaagacaaagatttctagaggaatatgcctaggatgagaattatgtaatttaaatcacagctggaaagagagaaagtcctaagttactaagaaatgttcaaacacaaatgggctttcagtctattggaagacctttatagctagaagtatactgaactgtacttgtccatggacccctgaagaaacaggttaaatcaaagagagttctgggaaacttcatttagatggtatcattcatttgataaaaggtatgccactgttaagcctttaatggtaaaattgtccaataataatacagttatataatcagtgatacatttttagaattttgaaaaattacgatgtttctcatttttaataaagctgtgttgctccagtagacattattctggctatagaatgacatcatacatggcatttataatgatttatatttgttaaaatacacttagattcaagtaatactattcttttattttcatatattaaaaataaaaccacaatggtggcatgaaactgtactgtcttattgtaatagccataattcttttattcaggagtgcttttttgatgatatggagagcataccagcagtgactacatggaacacataccttcgatatattactgtccacaagagcttaatttttgtgctaatttggtgcttagtaatttttctggcagaggtaagaatgttctattgtaaagtattactggatttaaagttaaattaagatagtttggggatgtatacatatatatgcacacacataaatatgtatatatacacatgtatacatgtataagtatgcatatatacacacatatatcactatatgtatatatgtatatattacatatatttgtgattttacagtatataatggtatagattcatatagttcttagcttctgaaaaatcaacaagtagaaccactactgatattttattatttcatattacatataaaatatatttaaatacaaatataagaagagtttttaatagatttttaataataaaggttaagagattcgaaagctcaaagtagaaggcttttatttggattgaaattaaacaattagaatcactgttgatattttattatttcatattacatataaaatatatttaaatataaagataagagtttttaatagattttataataaatgttaagagattaaaaaactgaaaatagaaggcttttatttggattgaaattaaaggccaggcatggtggttcatgcctgtaatcccagaattttaggagactgagtggggaggattgcttgagcccaggggtcaagaccagcctgggcaacacagtgagacaccgtatctacaaaataattaaaaaattagctgggcatggtggtgtgtgcctgtatgctaccattaactaaggaggctgaggtgggagaatcgcttgagcctgggaggtcaaggctgccctgagctgtgattgtgccattgcattccagcctgggtgccagagagagaccctatctctaaataaataaataagtaaataaataaacagcaacaacaaaaacactcaaagcaaatctgtactaaattttgaattcattctgagaggtgacagcatgctggcagtcctggcagccctcgctcactctcagggcctccttgaccttgacgcccactctggctgtgcgtgaggagcccttcagccctcccctgcactgtgggagcccctttctgggctggccaaggccagagccggctccctcagcttgcggggaggtgtggagggagaggcgctgggggaactggggctgcgggtgcccttgtgggccagcgcgagttctgggtgggtgtgggctgggcaggccccgcactcggagcagccggccggccccgcgagccccaggcagtgaggggcttagcacctgggccagcagctgctgtactcgatttctcactgggccttagctgcctccctgcggggcagggctcgggacctgcagcctgccatgcctgagcctccccccaacctgccgctgcagtgggctcctgcgtggcccaagcctcctgacgagcaccgccccctgctccacggcacccagtcccatagaccgcccaagggctgaggagtgtgggtgcagggcgcagggctggcaggcagctccacctgcagccccagtgcgggatccactgggtgaagccagctgggcttctgagtctggtggggacttggaggatctttatgtctagctaagggattgtaaatacaccaatcagcactctgtatctagctcaaggtttgtaaacacaccaatcagcaccctgtgtctagctcagggtttgtgaatgcaccaatcagcactctgtatctagttaatctggtggagacttggagaacctttatgtctagctaagggattgtaaatataccaatgtgcactctgtatctagctcaaggtttgtaaatacaccaatcagcactctctgtctagctcagggtttgtaaatacaccaatggacactttgtatctagctaatctagtgaggaggtggagaacttttgtgtctagctcagggattgtaaacgcaccaatcagcaccctgtcaaaacggaccaatcagctctctgtaaaaccaatctgctgtctgtaaaatggaccaatcagcaggatgtgggtggggccagataagagaataaaagcaggctgcctgagccagaagtggcaacctgctggggtctgtagaagctttgttcttttgttctttgcaataaattttgctactgctcactttttgggtccgcattgcgtttatgagctgtgacactcactgggaaggtctgcagcttcactcctgaagccagcgagatcacgaacccaccagaagaaagaaactcctaacacatccgaacatcagaaggaacaaactcaggacacgcggcctttaagaactataacactcactgcaagggtccttggcttcattctcgaagtcagtgagaccaagaacccaccaattccggacacaatttgactgcagaaaatggatgtccaaccctgtggtttccctgggccacattggaagaagaaaggagttgtcttgggccacacataaaatacacttactatagcagatgagctaaagaaaagaaaaaagtccatgcgtaatctttgtgatatgtgccaccaccaataagcaaaattgttctcttattcaaaaggttggacacagctgctctagatattttattattaaatatgcaggcaattactgtttaaatgaagatttcctcacagaatgagattaaaagtatatattagtggcttagcattcattttagacaaccattttagagattcaaatcacacacttgcttacagaaattttgttgtcttcaatgtccccattgtggtttctttaccaagcctctactgttcttcacatcaccaagttaaaaaaaaaaaaggggcgggggggcagaatgaaaattgcatggtaggccacaagttcagatcctcatcgacacaagaggtgcctgaagcagtggatgaggcttttctatggatcatgagcagccacataaatgcttaaaagggcctggcagggagcatcagtgggtgatgtggctgggaggctgaatggagagcatttgttcttcagttatctatagaaggcagctgtcactcagcaccagctaagggcttcccatgagggaactggggatcaggtttcccagatctttttatgtaacaggataagacagagatccagctttttttgggtaattatttcctattttaaaatacgggtagttgattaaataaaaacaaacgaatgaacaccatatgggcacaacaaaacacatctgtggcttggattcagcttgtgaatgattactgcagatatttattctagaggacacccctgggtatgtcctaatataaaacctaaatctaaactcaagtcccatgctaccttcagagaataaatgacccagaaaaagaaccacctctcctaaggaagtataaatttgtaaataactgagacccaaacttacaactatacatttttcttattgttgggctgttgctaacctcaattaagaaggcttgatgatatttgtaaagtgtcatcactccaccatggtccagtaacatctgatcactccaccatggtccagtaacatctgaatggtcaagaaatatctaaacgtatgtaccaaaaatttgtgtatactactgtaccaataaaccatttgtttccatttgatctctgagtgtggtaatacatgttatttgccctgctgttgtaaataaacaaaccaaatggaggcttgatgcaagatgcagtgtagcatagtgccaactctggactccgactactcagggtgtaaattctaactctgttctattaacaccatgaaactgagcaagttagttaaaactcgctgggcccattttctcatttatacaatggagattttaatagtacagctacataggccattttgtggtttaaaatacatcatgattatgaaacacttaatgtagggcttgctacataatgagcaaggtttgttgctgttatcattaatatccttaattctcattattataaaacttgagatagtatgaggtgaacaagttcataacagcaatataatgaaaattttaataattccttttatactttaacaaaaatacgagattgggtaatttattatttttacatgagtaataaatattgcattaaaatatatttaaaatttaccacattaatgtctgccagtcatgccaaatgaccaacatgaatgtgaataaaactcagtctgtgcccatttaatcttaaccaaccctttataattgttaatgatttgaacctctgccttgaaagatcacattacttgattgtcttcaacttatctgaatgtggtagtgatttctgtaaatttataggacctttgtctcatgcagctccatggagttgaacttatgcacctttaaaatggtatatacttaattaattaagtgttgatctgcttcacatgtgtataatattattagctcactaaaccaagaaaacagtggtcctttagggaaagaaactaaattacaacagagaatataaataccatataaatatctattatttattgaactgtcacaattattgcaaaaaattaccttttagtggacaaaacaattgatattgcccttttctggaaaagaaataatgtaatatatgatgaatagttttggccagtatcctctagaccttgccagttaactggctctcaaaattttgaataataaaaacttggtgatagtagaaaaatagtaattttttaaaagtatgtgcacaattatacaactaaacaattcattcaccagtgttcacaattctattgccttctttgaatcaaaatttacatagtttttcttttagactaagctcctttatgataccagtgtgcccatttctcattaccattgaaatgtctcatgagcatgtcacattctggtacaactgctaatccaggatgacagtttagttcttttaaatccaattgagagccttctactcatgaccagagaacctaaagaaaggttaagatacatttattccttggtgtaagtgatttgtctatttttagttttcctaagggtcatatttcaatttagatttttttttataggttaggtaaaataggcttcccttttgcaatatgaaatatgtagtcttttaaaaaatttcttcaaagctattaaactgaaaaaaaattaatttggtctattcagtttgttagcacttaccattttggaaagagagtgactctacttttgtatttggtaacattttccctactacagggcagtatcttttgtaagttcttagatattagcaccaaataaataggcaaaaaaaatctattatgttaattcttagaacccctgcttggcagtgcatcattgactagatggagaagaaatgaaaataatacattaggaagcagtttcctggttcttttgaaaacaactagagagtcttgttgttgactggaatatctgaagatcctgtttaatgctttcattctatgattgttaagaatatgtcatagaactgctgtatcctgtttctttatgtcttcccttctgtttgttgattagaaatccctgagtggctttacattattagtacagtagatatgtagtatattcccataataccactgctgctattgactaatagtaattattttagggcagctttatgacagttggtttatgttttagggtgtcatttgacttgtgaagcattgaaatctgggtattaagcacactgttttctatgtggtatggaatgattcttaaagccctgagaaaatggaaaataaaaatatttttcctttttaccataatcacctatgactgtcactctatcataaactgcataaactttataacctcaaaacattttggaaatgaaatgacagaacttgcttactcaattgcttctatatacaccaaatatttttttaaagtattatgttaagtccttgaaaatattttgttctactcaatagaagcagtttaggttggtagttctatgtggaaacagtgaggaaataattttatattatgatgactagaccagtctttgaacatcactttggttattgttccattagtaaatattataattatttctgagatttactcaccttcaaagaatgttggcaatgccagcattattaacactcctctagttagaacaaagaggaaatgtaataacaaaacataataatagccaaataaagagtgacttagaatgtacacccttatctaggatcctgagtaattcgattattcttaggaaatacacttttgtgctagaacaaagacttttgaaatagctaatttctgggtttcttttcattttgaattaacttgaatttcaaggaaacaagggtagtttttacagatacagtgcatagaagctctgtgtacaatgaagaaaagtaggaaagtgagaaaaatgccattagatttttcatcgttatactatctgatatgtgaatttaactaaaacttatatacctcattatagtacttcctaatgtaatttcttaatttaagtgttccccataaggtttttttttatataaacttaagtactgttaaatatttaaggcaaattcaggtataaaataagacttgttgatatcttattccaagcatatttgtttctctcctatttatttttattctgtgttcatttccaaaattgttttactcacaactgtttgttttttctgtttcattctgtggtaaaggtatcatttggctaattgtataatttcagtgtcatttctaatattccaattgtgatagtatcaacacaagattaaatttctctacatggtttatgagaatggaatgccaaattgaaatagaacagagcacagatgatctaaatataaaaagaactacaaaaatcacagttgtttaaaaaggttttttgtttgtttatatatggtgcagaacatttgttccttagccaaatgtttccaccttgagaaagctatagagattctatgtagtcctagtaccaataatatgttttaacctgaatgtaccttatctttattcataaactgtgactttttacactgctgaaacttttttttttaagacaatctcactctgtcgtccagtctggagtgcagcagtggtgtgatcttggctcactgcaacctctaccttctgtgttcaagcaattctggtgcctcggccacctgagtagttgggatcacaggtgtacaccaccaggcctggctaatagtttttgatatttctagtagagatgagttttgccacattggccaggctggcctgaaactcctggcctcaagtgatctgcctgccttggcctcccaaagtgttggtattacaagtgtgagccactgtgcctggcctgaaactcataattcatttccattaatattaatctcaccttttccaataattaattgatttcacaagtattagtcccctataatcattgaatggctaataaaattatttatagcaaacagattaattatctgccagcagtctgagattagtttctttaaaaaatgtttattatttaaaacattcagctgtgatcttggctttcttgtgaggttcaatagtttctattgagtaaaggagagaaatggcagagaatttacttcagtgaaatttgaattccattaacttaatgtggtctcatcacaaataatagtacttagaacacctagtacagctgctggacccaggaacacaaagcaaaggaagatgaaattgtgtgtaccttgatattggtacacacatcaaatggtgtgatgtgaatttagatgtgggcatgggaggaataggtgaagatgttagaaaaaaaatcaactgtgtcttgttccattccaggtggctgcttctttggttgtgctgtggctccttggaaagtgagtattccatgtcctattgtgtagattgtgttttatttctgttgattaaatattgtaatccactatgtttgtatgtattgtaatccactttgtttcatttctcccaagcattatggtagtggaaagataaggttttttgtttaaatgatgaccattagttgggtgaggtgacacattcctgtagtcctagctcctccacaggctgacgcaggaggatcacttgagcccaggagttcagggctgtagtgttgtatcattgtgagtagccaccgcactccagcctggacaatatagtgagatcctatatctaaaataaaataaaataaaatgaataaattgtgagcatgtgcagctcctgcagtttctaaagaatatagttctgttcagtttctgtgaaacacaataaaaatatttgaaataacattacatatttagggttttcttcaaattttttaatttaataaagaacaactcaatctctatcaatagtgagaaaacatatctattttcttgcaataatagtatgattttgaggttaagggtgcatgctcttctaatgcaaaatattgtatttatttagactcaagtttagttccatttacatgtattggaaattcagtaagtaactttggctgccaaataacgatttcctatttgctttacagcactcctcttcaagacaaagggaatagtactcatagtagaaataacagctatgcagtgattatcaccagcaccagttcgtattatgtgttttacatttacgtgggagtagccgacactttgcttgctatgggattcttcagaggtctaccactggtgcatactctaatcacagtgtcgaaaattttacaccacaaaatgttacattctgttcttcaagcacctatgtcaaccctcaacacgttgaaagcaggtactttactaggtctaagaaatgaaactgctgatccaccatcaatagggcctgtggttttgttggttttctaatggcagtgctggcttttgcacagaggcatgtgccctttgttgaacctccatttgactggcatgcacatgtctcagatattataggttatcatatattgttgctcctaatatttctgtgttagataattagagtagcttggtttgtaagaatgtgatgttggtgggactgtagcagaacaagaaggcccttatgggtcagtcatacctctcttttcaaatatttggtctagctctcttctgggcatcttgttgccaatatatagtattgctcaaaagggcaggagatttgaagtgatcaaggaaaatatattttttctattgattaagtcttttgatggggtagaataatctaatttcatgtaactgctcaaagttatatggtagggggatcccaaatgtattttaaaactatttttatatcatcatatttgaagtaatagaaagtcagagtagcagaataaaggtactaaaaattttaaaaactaataaggtactttgaaagaaatcaattatgttgattcctcattaaacaaatttgcacttaaagactgaggttaataaggatttccccaagttttttcatagcaacctgtgagcactttctctgttgaggcatttatggtatgaaaagatgagtaaggcacagttcttgccctggagaaggtcacaggtgagaggaggagttgacacagaaacatttgatataaagcaaggaataaattccaagactaaaattttcagaaatctaaaaaactcaagataagaaaaacccattatattttctgggtaacaaaatttcagtgttattaacatgtaggaagatcttgatatttattctgaagcccatgtgtgttgctgaaatattgccgcatttgcatatactcatcaccatcctctgttttggagctaagaattttagactcaagatgtctaattaagttgatccattgattttattttttatggaaatctgagacccacagaaggcaggggatttgcccacatttctagaagagtcagacatgagcgatgaggcacagtggaaagaacatgagcattgcctgagctctgagttggcgctataagagcagtgatcatgggcaagtgactcttctgagccttggcctcctcacctgttaagtgaagaaaagaatatttcagaagatctttgtgagaatgaaacaaggcaatttacttgcctgctacatagccaatgggaaatcaatataagttccccgtggttcccttctgtggggttttgttcccacagagggtgcactggccattccacttcttcttttccaagctcctcattccctttaacgctgttcatagttggttccaaaccatttgaaatataataagcaccaggatggttttttctttccaccaaagcaaatttcattttctaaacactgtttataaatatcaatggctattttttcaatttttgattatcatgaaaatatacaaatatgtttaattaaatatgctaaagaatgtattaataaatatgtattaaataattcctacatataaggcctttttgcttggggtatgggtgatacaaaataaatgtggcatgaacccactgacctctagcaatttataacctagaaaaagagttatgatatgtttataagttcctgtgatataagacatgcatatagtcattataacagaggtgcaaacaagatgtatcaagtatgtccagaggaggaagagattaatcccagctggaggaaacactgatgctttcttgcagcaggggcatttgagttgagaaagggaggaaacatagattttgacaatgagagctgaggggaaaggggtttcaggtggagggaaccgcatgtggaaagcagggaggtaggaaagtgtagagtgtgtttaaagaatagaccagtttggctgaaacaggatatttgagcagaggaagcttgtactaggtaggtgggttgaggccaaattatgcaaggcattaaatattaaactaggaattttggactttatcctgcagtttatggggggtaaatgataagattcaatatcactttatttgtacagtattatgttacattttatctaattgtttgtttaattcctgtctagacaatgaattcctcaagggcaaggagcatggcttattcacctcagtaatttcagtgcctagcattgtgcctggtacaaagtggacacttgtatataaccttttttaattgaagcaacaagttgtcaaccttacaaatgtgaatccgtgattcagatgacaggttgaaatgtagattgtctgcgaagagggcagaaagagagtatgacaaaggaggacaagacagtggggcaggcagggagagagagcagccagggtttcggtagaggtatgtcaaaaaggtatggaagtcagaggagaaggagacccctatgttatagaatacaaatggaagggaaatgatgacaacagtaagttgtcattaaatgcaaggttgcaaaagtaagattgtaaagcaggatgagtacccacctattcctgacataatttatagtaaaagctatttcagagaaattggtcgttacttgaatcttacaagaatctgaaacttttaaaaaggtttaaaagtaaaagacaataacttgaacacataattatttagaatgtttggaaagaaacaaaaatttctaagtctatctgattctatttgctaattcttatttgggttctgaatgcgtctactgtgatccaaacttagtattgaatatattgatatatctttaaaaaattagtgttttttgaggaatttgtcatcttgtatattataggtgggattcttaatagattctccaaagatatagcaattttggatgaccttctgcctcttaccatatttgacttcatccaggtatgtaaaaataagtaccgttaagtatgtctgtattattaaaaaaacaataacaaaagcaaatgtgattttgttttcattttttatttgattgagggttgaagtcctgtctattgcattaattttgtaattatccaaagccttcaaaatagacataagtttagtaaattcaataataagtcagaactgcttacctggcccaaacctgaggcaatcccacatttagatgtaatagctgtctacttgggagtgatttgagaggcacaaaggaccatctttcccaaaatcactggccacaaagtgtgacattttggcattggcatcactatttgatggaagccaacctccccccaaaaggcctgtattagaatgaagatggattccctgggtgggttacacttgaaactagcctcacccatgaacactttggcacagattagctagcccattcccccacagtaaggaccataaggaagggacagaagcaaagataagttttagaacaaaagagaggggaaagaaaaaatctagggttttatgagggctgtccctgagtgatagatgtgaataggcctccagggcaggctggctcagaggctgactctttgggttggggtgactgattggtggtgaggatggagaagaaaaggggagtggaggaggtgaaagtgaccttgggacattaggtctccataagtgacaggatttaaggagtgttgtaagctgtggttgttggaccaggtttaagcacagcttcctgagcttcctgactggtttaggtcaagctccagagagcaaatgccacagtctcagtgatctccttggagaaacagttggaataggatgttgcccatgttgggatgagtcattgtccgctcttgctctttccctacccctgcaaaataataatactgtatttgattgaacatataaaacaaaagaaggattatcacataagtatgtatatataaccaacattggcaggtgcagaaaaaccagactgtcagtttgcctcatctgaaatgattgacacaaacaaatatatttactgtcccaagtgaactttggcattttggatatccttcagttgttctgtttaaagatataacttagaagcagctgatggaatatttaaatccatgcgttgaattcatgcattcaaagaaacatgtcctgagtcactaaatgctgacatttgtttttcatgttaagagtgtaaataactggtcccaaatataatattattacatcagataaaaactggaatgtgaacctcttaacttgattgtgaaagtatttgccaatggtgcctcttgataattatttgaggctcacttcagaactcctctggaagggttaatttttaaatagtcattttataaattaacatttttgacatatgtgatggctctcaaattttttcttttatgccagtttgaatcatttctgctcaatttttttttttaattgggatggagtctcactctgttgcccaggctggagtgcagtgatgcaatcttggctgactgcaacctccacctcctcggttcaagcgattctctcgcatcagcctccagagtagctgggattacaggcgcgcaccaccatgcctggataatttttgtattattactagagatggggtttcaccacgttggccaggctggtcttgaactcctgaactcctgacctcaagtgatccacctgcctcagcctcttaaagagctggaattataggtgtgagccactgcaccaggccctgttcaacttttaatgctaagattcatttgttgttgtttcacaagtgattaggcagaggtcttttatattaatttacccattttatttgtaagagagtctcatattaaggaagcataatatatgacaatccaaatacagtacaaatttggttaattttgattttgttaaataattaatcacaggggtccttcaaattgtgagctcctctggttatacttatgttttacctctggttatacttaatttcaaacaaatgaaatttcattctattcatgatatttcagaagcagatctgttgcacaaaataaagcatacctataaattttctttttttaaaaaaaagtctctgttcactctattttctattatttttctctttttaaaatttgaattttattgtggcaagtccacttaacatgagatttaccctcttaacagatttttatgtgtaaaatacaatattgttcaccatgggtaaatgttgcacagcagatctctggaacttattcattttgcactactgaaattttatacctgttgattagtatctccccatttccctctctcccctgtcctgttacccatggttctgttctttgcttctttgagtttgagtattttgatacctcatgtaatcttcattctattttctaactttgacaatgttctgacaaatttgctttccggattggagcactgtatagtgaaaattgaaaatcttggttattttctacagattcccactattttaccttgagcagacacttatcttgaagggtctcagatttgtcacttgtagaatggggaatataaacctgataatggtccctttcagttctaaagttatatcagttgaaaatacatgtgtcacttatggtaacgggtagagaactggctcactgaacagcatatggatattataaagtggttttttttaatcctttctgcagacagttactttatactttattcaaatggattattgtgaagtacatgttagcggactttgtaccttttaaaaatgtatgtatttggtgtaatgtagaaatatagaaatttattaagtatgatttatttcaatgttaagcatgagaaaatatgctccgaaaggttagatagcttgcctaaatgacaagcttgtatttcaagcagaactttctgaatcaaaagactccaagacgaatgcccagctttcaaaaactgtctaaccaaaataaatcctaagattcaccttcatactaaaattatttaaaaatagtttattttaaattaatattcacttaaaatgtatttatcatgcaatactttaaagtgtctgggaaatgaaaatatccaaagatcaaagaacaccatgttttcaaacttcaaaaatgttatcagtgacctaaacaatttttaaaattttcatagagcctatgaaaaatgtacttgcaaatggctactttctgactaggaatagaatggggagagtatttagtccaacaatgatagactggattaagaaaatgtggcacatatacaccatggaacactatgcagccataaaaaatgatgagttcatgtcctttgtagggacatggatgaaattggaaaacatcattctcagtaaactatcgcaagaacaaaaaaccaaacaccgcatattctcactcataggtgggaattgaacaatgagatcacatggacacaggaaggggaatatcacactctggggactgttgtggggtggggggaggggggagggatagcactgggagatatacctaatgctagatgacgagttagtgggtgcagtgcaccagcatggcacatgtatacatatgtaactaacctgcacaatgtgcacatgtaccctaaaacttaaagtataataaaaaaaataaaaaaaagtttgaggtgtttaaagtatgcaaaaaaaaaaaaagaaataaatcactgacacactttgtccactttgcaatgtgaaaatgtttactcaccaacatgttttctttgatcttacagttgttattaattgtgattggagctatagcagttgtcgcagttttacaaccctacatctttgttgcaacagtgccagtgatagtggcttttattatgttgagagcatatttcctccaaacctcacagcaactcaaacaactggaatctgaaggtatgacagtgaatgtgcgatactcatcttgtaaaaaagctataagagctatttgagattctttattgttaatctacttaaaaaaaattctgcttttaaacttttacatcatataacaataatttttttctacatgcatgtgtatataaaaggaaactatattacaaagtacacatggattttttttcttaattaatgaccatgtgacttcattttggttttaaaataggtatatagaatcttaccacagttggtgtacaggacattcatttataataaacttatatcagtcaaattaaacaaggatagtgctgctattactaaaggtttctctgggttcccaaatgatacttgaccaaatttgtccctttggcttgttgtcttcagacaccctttcttcatgtgttggagctgccatttcgtgtgcccccaaactctacttgagctgttagggaatcacattttgcagtgacagccttagtgtgggtgcattttcaggcaatactttttcagtatatttctgctttgtagattattagctaaatcaagtcacataaacttccttaatttagatacttgaaaaaattgtcttaaaagaaaatttttttagtaagaattaatttagaattagccagaaaactcccagtggtagccaagaaagaggaataaatattggtggtaattttttaagttcccatctctggtagccaagtaaaaaaagagggtaactcattaataaaataacaaatcatatctattcaaagaatggcaccagtgtgaaaaaaagctttttaaccaatgacatttgtgatatgattattctaatttagtctttttcaggtacaagatattatgaaattacattttgtgtttatgttatttgcaatgttttctatggaaatatttcacaggcaggagtccaattttcactcatcttgttacaagcttaaaaggactatggacacttcgtgccttcggacggcagccttactttgaaactctgttccacaaagctctgaatttacatactgccaactggttcttgtacctgtcaacactgcgctggttccaaatgagaatagaaatgatttttgtcatcttcttcattgctgttaccttcatttccattttaacaacaggtactatgaactcattaactttagctaagcatttaagtaaaaaattttcaatgaataaaatgctgcattctataggttatcaatttttgatatctttagagtttagtaattaacaaatttgttggtttattattgaacaagtgatttctttgaatttccattgttttattgttaaacaaataatttccttgaaatcggatatatatatatatatgtatatatatatatatatatatatatatatatatatatatatagtattatccctgttttcacagttttaaaaaccgatgcacacagattgtcagatagcaattctgtgattgaaggggaaatatgtcacctcttcatactcatattggtgaagggtcctagcttcaaaattaatagattcctaaagaggggaaatgaaacatccgcatttacacacacacacacacacacacacacagagttcctcttgtcggtaagttttgttttttttaaatctctactagataaaatttgttatctaattgtgagttttacacaaagaaaaactgtcacagaaaagaaagacagtgtcacatttttcaaaagaaaaagaagaaaagaaagtgccatgtttttcaaatacaaatgttctggattgattttaggatctttagtgaaaaacaaagtatttcataataagtaaaataaaaatctatgtaggtaaatttgtttctctaatttaagaatttgaatttctgagtatttatgataagtgttgaaataacttcttatatgtgacagtgaatactggcagagcaaatgccaaatcaatgccaaatctgtaggatcatttgattgtaggaacagaattctactcaaaccgaaagcaggcatttgctggagttacagaaaggcctcatggaacaccgagaaggtggtgccattcgactcttaaagaagctgcaacaggcacaagagagtcagctgcagctcttcttcttgagtctatatctgtcctgggtccattcctttttgtggttgcttcattcctttctctctctgaagactggtttttctggtctaccagggctatgccacattgactttatgtagtgtctccattctggcctcctgaatttacaggagagttcctctgtacaaactcaaagtcctggagagaacagaaaacagcttccttttggctcaggggtccaactgcagtctactctgctgctatgaggatagtgggttcaccacctttgttgttctctcagctagggcagtgggaaatgactctatgaaaggaatatacatgggcaggcaaatgtactaatcctcatcagtactgtaattttaagcaactttaaaaaattcttttaagttatttgaaaataagatcaaagaaggctgaattacataaatgaagatttgttaacaattaattcaaaccaatataacacatgctataacatggttgagtgtgattgagtcttgatttattaggggcaataatcaaaacatttaacaatcattatagtacagaacttaccaatcaaatcagatgctcagccggagtggatgttggccacccagctattattatccctggctcaattggtcttcagctgtgttaacttgcaaacattaattaactatctaagcccctcattttcctcaagtgtaaatagacacaataatattacctattccataggtgtggggtgaatagtaaatgtaataatttgtccaaaacacttagtatagtgcctggtccatggtaaatactaaataaatgttatctgacttattattaaaattttatcttctcagcttaaccttcagaacagtaatatattggggtctagataaatcttgcctatatgaaaataatttaatactacatgcagatatatgctgtgtatattatgccttctgttagaggaattgcagaaacaaaaatttcaattaataataagatgaattatttctcccaattgtagaatcttttgacaattttatcatgcattacagatgtaagaactcttgattgggacttgatagtctaactttataataatttaagaacattcctcttagagaatttctatggccataatactgaacacatgaattttaattagctgtcctctttagccctaaaaaaaaaattactgtaatttaacacttaagtgttgttcttcccaggtacagtaatctttttttttttttttttttttttttgcatagagggtaatcttttctctttccaaatggcagaactgttagttttctgactgtccggtgaaattctaagtccacttacttcccaatagcatgcaattagcaaaggtcctccttgcaaaggcacagaacacacctaaacatcttgcagatgctgtttggacactcttcccctgcttttggtctctttgtaaagcagctcatctggatacaggatctcttttccccattgcccattctaatatatgttaccgttattacttatagaataatagtagaagagacaaatatggtacctacccattaccaacaacacctccaataccagtaacattttttaaaaagggcaacactttcctaatattcaatcgctctttgatttaaaatcctggttgaatacttactatatgcagagcattattctattagtagatgctgtgatgaactgagatttaaaaattgttaaaattagcataaaattgaaatgtaaatttaatgtgatatgtgccctaggagaagtgtgaataaagtcgttcacagaagagagaaataacatgaggttcatttacgtcttttgtgcatctataggagaaggagaaggaagagttggtattatcctgactttagccatgaatatcatgagtacattgcagtgggctgtaaactccagcatagatgtggatagcttggtaagtcttatcatctttttaacttttatgaaaaaaattcagacaagtaacaaagtatgagtaatagcatgaggaagaactatataccgtatattgagcttaagaaataaaacattacagataaattgagggtcactgtgtatctgtcattaaatccttatctcttctttccttctcatagatagccactatgaagatctaatactgcagtgagcattctttcacctgtttccttattcaggattttctaggagaaatacctaggggttgtattgctgggtcataggattcacccatgcttaactgagtggtgccaaattgtcctcaagtctgttgtactgatatatatccccatcaagagagtacaagaattctcatagctatgtatcttcaacaacacttggtgtctggtagatgtgaagtgattactaaaaatatagggaagctgcatacataattattggcttttgctgttctcttacattaatttcttattcatgttgattactcatttgtcacctagttttttcttccttaattaaattgtaggaatttatgaattatggattgatcatcagctctatacatttcaaacataatccctcagtcagtggcttggcttatagagtcttttgatgaaaagaagcttttaagtttaataaagttcaatttattgtcttttcctttatgttttgtgcttttggtatcttgattaagaactccttccttatattgggttctcaaatttagcagcataacattttcatactattatttaaatttttttcacattatttagtgatagcacctttcttattcctaaagtgtttatcattgccttctgtctttctgcttgataaatattgccacacatttgtatactttattagtgtgtacaaagaccacattttagttgtgttatttctcttgttttggttttctagaatgcagagccattaatattatagtaatgcttatgtgctaataccatatcaggggcacaaatcccattgcagcgggactgagaaattaaaggaaatgatgcacatttactcatttttgtttaaaaaatcaaatgcatatttttcaatcagactatatggttggtctggatagcttcatcattgaatttttaaagtatttttgtactactgtatttaaaattattcattcaccactgcttttgtagatggtttagaaacccaagttaggaatgactgtgcaacactattattatactctttttaaaattatactttttgcttaagtttctttccttgttctctgagacagtgttcatgttcccaaaccacacacatttattcagctataaaatttgtatgatcaactcctgtcagaacaaacatcattataaaaaatatctccaggaaaaagaaaacccttttaatgctctcttctggttcatgtgtcttcttattttctttaagcattttcataacccattgagctgtaatttaattggaacatgatttatactaaagttggtttctttacctttaactttttttttttagtttgatcagctctctttagcttctgtagttcggtctttaattccattccagtatgcttttggagttgggtctcataaatgtatagaaatgtttctgttgggaaacagcaggagaatattaaataaatattgtgcttacatctatttaattctttgcccaactttctacaactttgactttacatttaagctcctcatgcacttacatgtttctttacctaaaaatatcttttcaccatgggtgtgtacaattcctttgtccttgctgtattaattttcttggtttacatagtagcctctacacattgatgtcaaaacctctgtttggtgcatttctactctgcgtgttcaatctccatgaaagtttctgtaaggtattttcattcctctagtttttcacatgtgcatcctggctttgtgacctgtgctttgatatcgtgcctttcatcttgtggcattgaaggatctttgcaaggacctattgtgttataatacagtctatgaaaaatatcaatatttgcatttgatcacatttaaaaaaatcacattcttttgtttgaatatcaaagctaatatgtgagtgatttccctgccaaatagcacaagtagcctttcctgggtgtttatgggcatttatctggttaatgattcccatcatagtgctgtcacccatgccattgctaaacttatacagtaacttttttgttttcacctcagcatatgttgagagtaggaaatagataggactatgccctcaaattttacgtttatatgatgttaatcctaaaggtccttgtgacttctgaagtaaaaactcagtgttgtcattttacttactgaattgttagctgagtttagagttgagtttacaatggagtaaacaaggtgtttagtttgatgtatgcttttagtctttcagaaaaaaatgtttatacttggaaagaatagtttatttacccatctggcctagtttagacaaaaacacagagtcaaatgtcaacagaattctgaagttataaaaatgacagtgtggctttttttttttttaaccttccacctggtgcttatgcccaagtgcctagctttctttagctctcaactaataaaggtaatgtttagataacatttaacgttaagttgcattgtgtttatgatcacatatctcaaatattggtacacgaaactgtacaacaaccttttttattagattttcctacgaaattccttattatattccctaagatagctttttcccaccttcttcttccttctcccttctcaggtgctccaataattccaacccctgcagccagtgactttattatatctttttttaaaaatctaaaaaaaaaaattgatgcaaccaggaagaattttctcatttctctccaccagttgtaccagcctactgcacctctcctcatgcaccaccttctgcctgtgttcttgctcctatattcaggagcaagtaatatgcaatacctccctctttgtgggatctttctcattagcataaaaatactttcccttgatctccagctactaccccatttctttgacctacatatagcaaaatatttgagaaaggaccactttccatcttttcctcaatctacttccatttttttctcaatccactttcatttcattgttctcctcaacccattctttccacaacctacttcattttatttccatcagccccataactcaggatcaacatcttgccagagccaatttccttgtctcccttaacagctccagcagtatttatgccatggacaaattattcttcttgtgatactttctctcttgcttccatgacactactcccacttcattttctttctacctctctggctcttccttggtcccttttcctggccccttctctctttcagatctctaaacatcagctatatctcagccctgttctactgacactctctagctgttattttctaaacccatgtttcagaaaccatatcttgatgaatcttggaaggccgaggcaggcgaattacttgaggtcgggagtttgagaccagcctggccaacgtggtgaaaccccatctctcctaaaaatacaaaaattacctggccgtggtggcatgcacccagctacttgagaggctgaggcacaagaatcgcttgaacctgggaggtggaggtttcagtgagccgagatcctgccactgcactccagcctgagcaatagaggagactccgtctcacacacacacacacacacacacacacaaagaaaataaaccatctcttgatgaatcataaatttgtgtctctagtttagacctctatcctgctctctaaatgatgtatccaactatcatcttgacaccatcatatgttcataaaacataattatagaatatctttcagtaggcttgacattttaaggcatgagtttccgttcagtatctccttaaaatatacccagggtctcaggagactattcaaacaggacaaagcttctattctacttactaatgtgtctggccctatttggcaggttggataaaaagtcatctgaacattgtcactttatgaataatatagtttaatagtttgtgaatcacccctgcaatttaaaaaatagtaaaattatcagaatctaatttaataattcctattggaacaccccatgttaggggatttccagttatttcaattgatatctcaatgttttaaaaattgtttatttctattactaattcactctttattttaacataaattgtggctatctatctctattcatttcaattatatttctcataccattctatagatggggtgaaaagaaaagtgttaattttttaaaactccatacctcaaatactatatgaatttatagttgttattgctaaagcaattatcttacatcttttcctccaaaacaaagttatgtgctggtttattttctttgtactcataagatgccttccatttttagtaacataagtcttgtctttctcctattcttagctacttaagcattatgtagcttaaataagcactaaagattcctatctgtatgaaaaaataaagattaaataaataagatctagaaagggtgacaaggtgatgcttcaaaatgaaccataccaagccatctagcgattgataaattactcacactcataatcacattgttggaaagaagccattgacaattcagtttgtttcacaactgtctatcacatagtgagcacaactaaaagactactttttgtcttttactgcttgttttgttgatcaagtgactgattgtacaatgaccaacaagaagtctgatgtgtagagaaaaggggaacctggcttttctgccttactcctgatgcctaattctgagcatgtgaatattattctgtttctttaattctccaagtgaagcagcagataaaccatccttgtttccattagctgtctaccctgttcaactgtgtgtttctaataacataagaataagaaagccaccagggtgagcagggaaggcaatgagtctgcaaggcttgtggatagatttctgttagtgaggctctagaaagttcttccaagattgatgcaatctgagaagagttttctgtcaatacaaactccctgggtttctcctttgtccttttactgcctgtgtttgttttgggttccagtaaagatcaagtgactgattgtaccatgaccaacaagaagcctgatgtgtggagaaaaggggaacctggcttttctgcattactcctaatgcctaattttcttgtactgaaagtagtttttgctgtaagaatctgaggggaggagtcatttcttcaatttttttttttggtctccttttaatggtttcttgatcatgtctatccttatttttctgttttcacaaatttttgtggtatattttcctctcatgacctctgtctcaagacttctttccatccatctcttctcatttcatcctgtagagtgtctgtggtaagagccctgcattctactctggccttgccatgtgtggccttgggcaagtcctagcctccttgagggtcttatttttctcatttgtaaaatgaaacagtttgatgagaagttttctaaggttccttcaagctttgacaatctctctcttctggatctttttcccatgaaaaatttcaactcttgattagcatgtaggcagggattattccacatccttataggaatcacatttctgctactgtccctgaatgctagagtccattgattaagttattcactgctgcaattgtcagagctgatcaaagaactctgaaccagtgtgttactagaactaacaaagaaaatgccattatgatgttctagagtcttgaattagtagaagaggtttaataagaaccctaagggattgctagaatgttaaaaacaaacaaacaaaaaaaaaggttgaaaagtttagaaaattcactggtctttgtgcccatcattttacttccagggtttagataatctcatttttgcaatgaaggaatggattagatcacaagttctcatcctagtagcacatgcagaatctttataaaaacacagagtagccaggtgcggtggctcatgcctgtaatcccagcactttgagagcctggggcaggtggatcacttgagaataggagttgaagaccaagctggtcaacatggcaaaaccctgtatctactaaaaattcaaaaattagccaggcatgatggcacatgcctcccagctactggggaggctgaggcaggagaatcgattgaacccgggagatggaggttgcagggagctgagatagctccactgcactccagcctggtgacagggtgagactccatcacaaacaaaacaaaacaaaagaaagcaaaaacacagattactcagggtccactaagaccagtgaagtcagttctcttggtagggggcagggtgactgagcatgatgtttgtaattttaaaagtgctccaggtgattctagtgtgtatcaagcaagacttgtgaaccactgaactacatgctaagactcattttagctctgattttctgtgagtcatagcagagggctcagcaaactttttctataaatgctaagatagtaaatattttcagctttgtgggctgtatcgtctttatgacaactcaactcagtctttgtagagaaaagcagctgtacataatatgtaaactaatgggagtagctagatgtgtcctgtgggccatagttttgctgactcctggtctatgtcatagaatttccttttgaattgatggaccaccagcaaatgatttttgtcctgtatcaatcaatgatacatacataaatctctacaagacatgtaaaggatgaggcttaatgacagagtactttggggaagacataatattgcaaaattaagatgcttagagaaaaatcatattaaaatagtgaaaactgtgagaaggtattttgatttgttgttttggattcctctttttgcaaattcttttgaaatattttcagtggaagctacatagatccaattgtattcaccaagctagattgtaattaagctccagagtaagtaatagatttgatgagtgatgtccaaccttttacatggaagagtaagtttgagtcttcctttgcccattgacacacttagtaccatgtttaccaaagttcttagttattgaaatgggcaccagcatattttgaaacgttggtgttaacttgggatatgccttttgtcatgttgcaaatagattttgtttctgttttgtgaagatcaccatctctgtcacttctgatagaaaaagtgacactgacttctcaagtgatttgacacaggttaaaatatgtaaaccatttctgtagagagcaagctgtaataatatactaaagggctaggtttatagtataatataaataactcatttatgctgttaataatttatagcaacatggcatttgactgactttttatgtgctctagtcatgtaagtaatagatgtggaaacatagaccagagtttcaagaacatgttttgggcagagtctgttttcttgctattatctcttaagtttatgttcatggcctaaagattatgctaatggatctgccttggtcttgggtgtcaggtctgtgttagcgagtattgaaaagcatagtttttgcctactgggaaggatttatgatttaaaagccctaaatctccccttttatgtacttcatacttagaaaatttttcctgtaaactgtgtgacttttttacattgtgccagttttctagatgactctcgtcatatttatttcttgcaatccttctataactatcagttatgaagtctctttatagtgttgccagccaggtctcaggtgtgtgaaatgtattttctattatggattttggggtatgatggcacatagtttgggtgttaatgcctaatcttgatgtactggcttctgaacaaccaaaaggatgaaaggaaatagaacaaatatttttgtgagggagaggagtctggcttcttgacttactctagaaaaagcctgtaagcctcctcttccctccttgtcacacaaagtgacaaagaaaatcaagaattgttttcttcttggcttaaatgcatcccttataaagtaaggctgagatcaggctgtgaagctatctttttgtcaagactgtcataattccaaaacactttgttcttctaatgcttaggttagtaactttaaacatttttataaagatagtgaggtccagttttaaggattgaccccttctcaaggggctcagaagaggttttggagaataataaaattaaataatgaaaccaataatttaaaccagatcatgatccttaagaaaaaatcccatcaaatttgggctaaactctaatatacagaggtctgcacaacttatgtcaagtattcttccccacaaatgaagaatggggttcattgtgtcattggttgggtctcattttggcttcatcttctatttctcaaagtctaagaaaagtgctcctacggaagtgggtgttggctatcatgagactttgctgctggcaggccagcttgctgctctagacagagatatccctcgatcctccttggacaactcttttctgtgcacaggaagcagcaggctggggttaaggagtttgccaatccagtcattctgataattgctgaatatgaatttctatccagcacaatctaggtagctacaatggcacagtagtttttatgtatcaggtgaaaatgtttaataggcactctaaatgagagaaaaggttaagtgaggttaaaagctcaatgaaaacaaatagatgagactaaaaatagttcaataggttgtaacttccatctcatccaaacagcaatgaatattttgaggctgaggcgctgaggggtaaaattgcagcctggactacttgctaatgtagacctacagcactgtcattcttactgcacagacactgctttctgcataggaggtagaataatgaattcatttattattaacaaagatttattaagtgactgcatggtgctaaccactagatggggagggatgttttgaactgtccattgtttgactataacaaggaacgctttgaacgaggttactatcataggcagaatttgtttaacatgaagcctatgagacataagccacaggtcctctcacgtgcaggaactcctttgaaggccctatacttaattttatatgcatagtttggatttggattcttttttttttaagagttccccaaattacttaagcttcaggctccacaaaacctggatctacccctggtagcagctatgaatctttgactatgaaattaagtgtacaagaaatatgactttactttttctgtgattgagtttattttctatttgagcacgcattccactgagtgaaagaaataatatcattgaattcagagattttgctgggttctaagtggagtttacagaatgccatgatattaggaattaaggagtgtgttgccctacatcatcttttgtccgtgctcactgtctctgaggcactgatgttcctatgtgacctagaggggcatggtccaggtagatggagtctgtccttgttctcactgtgagctctcgcttgctgacccttcttcagtttcttccatgcccctgaggggtaaaaagattcaaatctgaagctatatcaagccatctgtgcatagacattccaagcaaccatgttcactctactgctcccatgtcatgcaaggcacaggaagcttcactatggcatgagtatttcctgggctttgccttggaattgaggcacgggcctcctttgttctaaaattccccaaatctacttgaggatagaaccaggatttggttgcaaggcagaacttttcttagaggacctggtatctaaaccctcttgttacccccatttatggaccccatttatggggtgaggagagtgactgcttctaatccatcataatttttgtctatggctactgtttttgcatagacactatgttttgagtccttaggctttggcttttggcgcttaatggccaatattcacatggctcaaaattttcaaatgatccatatctgacttgagtttcaaaagtcagtttttgaaacttaaatgatcagaattgatttgttctgctctggttctgatgtggcctctccttccagaggtactggaggtagaatatccaaggtggaaagcccacgactacaaggaattggttagtaattcataatgttagctgtccacatctattcagtaatggcatttcagtggctgcacaactgaccatggtgaaagtgtctgcacaagccactttttcttcctgtcagaaaatgttctcacccactgaattgaatgactgtctgctcatatgctgtgaatgagtgcccagtcttaagattaaatcacacgttcttggctatgcatatttgggcatgctgtggggagttataataggctgtcttagagtcacattaagcagctagacagacaatgagttggaaagttacattttctaaatttgattggtacattccatttgtcacatttgacattagaagttctggattcaccctctatggtgagcttcactaatggagaatgtaatttgcaatgctcaaacacaagtcctaaacagaaaacattgtatgttacattccagtgctaccaaaatagtggttttgaaagtccttattttctaatactactatgtgtaattttgagtcatttagatagcaacagttaaatgttttatagattgtttggaagtattaaaatgtgaaggatttttgttatatagtgtctttcctatcttgcttaataaaatataagtttagaattgtgtatagaattaacatgcaaaaatatcaagtctcaactttatacagttaatctacatttgtgtatacccttcaattatttcaagagagggatactattcttatgcaggataaatacaataagatattttaaatgaattttaactacatctctggcagtttcatctcaatagtagttgtaattttatctcccagaccttattatagactagcagctctctatgaaaattagtgacagtgtgagtgtattttaattcaaagttaatcaagaatgactgagtcaagagttagctacccctgaaagtaactcataattcagaatttaaaatattacatgtggaacaatcatgactatatgccttttactttctctatcattatttaggttgtgggctttgggtccttttcacatccgttaacagtgggcttgacttcaaaggattattttcttgaatcttgaataattgctgaagacaatttgaagatattttcaagatgaaggaaactgaagcacagaatcactagagtgaaaaaagaacttcacaaacagtgcaggcttgatcaatggcatgggaaaacaggcaatacagttagaattgctaagatggaattttaacgttcaattaaggatctatctctaaactcctctgctttatccaccaatcattccatattaaagatgaagaattgttcccatttcaccttttgataaggaaaaatagaaataacagaagcaaatacacttttgcccacatttttttccaaaaagaataatttttgaagtctaaacgtttggtgtaaataagatgatgtgttaatattgtaaaggaaagctagttaagtttttgactgaataaagccagcatcaataattactagtaagactaaaaataagagcagtaaaattgtgtctaatcagctactaatatctgggaaggattgagccacaggatcaaagatggtatcttttaaaaatagaagttgagtgaattcggtcttcaaattctttctttttattcatttatatttatttactcattagtatattcattcctttattcatgtattgttcaaatatatattgggtacttattatatgccaagttgtttttaaaatcacattccaaattcccgtaagtcataattattcagagatgtatgttttttttaaaaaaaattgaacacctttaaaaattatcaagtccttttatttctgtatgcattaaagataaactttactaaatgttacatgaatagatttataaagcagataaatatttaatttcaaatataacccttatatgcaattatattttccttagcactaaaaatgaatatttaagtaatttatattaaaagtgtaattatttaactgcagatgtatgccaatgacttaaattgtttaaagattatagcaaagttgtttaaaattgtctaatcatgaagagttcacttaaccacctggttgacacataaaattatagttagttactaaggtagttcgagagaaagagaagaatcttcagtagtggttttgaggtgtggtacattttattataatataccggttatacagcattgtgcagtgctgctcatagtagaaataaattttctctttgatgtcatctattcccttgtgtggcttacataactgagaattaggtgatcacaaaaataaacaggcctatacagagcccatttatataagtcctggttatttctcttcagttaaacttttaattatatccaattatttcctgttagttcattgaaaagcccgacaaataaccaagtgacaaatagcaagtgttgcattttacaagttattttttaggaagcatcaaactaattgtgaaattgtctgccattcttaaaaacaaaaatgttgttatttttatttcagatgcgatctgtgagccgagtctttaagttcattgacatgccaacagaaggtaaacctaccaagtcaaccaaaccatacaagaatggccaactctcgaaagttatgattattgagaattcacacgtgaagaaagatgacatctggccctcagggggccaaatgactgtcaaagatctcacagcaaaatacacagaaggtggaaatgccatattagagaacatttccttctcaataagtcctggccagagggtgagatttgaacactgcttgctttgttagactgtgttcagtaagtgaatcccagtagcctgaagcaatgtgttagcagaatctatttgtaacattattattgtacagtagaatcaatattaaacacacatgttttattatatggagtcattatttttaatatgaaatttaatttgcagagtcctgaacctatataatgggtttattttaaatgtgattgtacttgcagaatatctaattaattgctaggttaataactaaagaagccattaaataaatcaaaattgtaacatgttttagatttcccatcttgaaaatgtcttccaaaaatatcttattgctgactccatctattgtcttaaattttatctaagttccattctgccaaacaagtgatactttttttctagcttttttcagtttgtttgttttgtttttctttgaagttttaattcagacatagattattttttcccagttatttactatatttattaagcatgagtaattgacattattttgaaatccttcttatggatcccagcactgggctgaacacatagaaggaacttaatatatactgatttctggaattgattcttggagacagggatggtcattatccatatacttcaggctccataaacatatttcttaattgccttcaaatccctattctggactgctctataaatctagacaagagtattatatattttgattgatattttttagataaaataaaagggagctgaaaactgaattgcaaactgaattttaaaactttatctctctgtggttaattgcaaacacagatacaaaaatatagagagagatacagttagtaaagatgttaggtcaccgttactaacactgacatagaaacagttttgctcatgagtttcagaatatatgagtttgattttgcccatggattttagaatatttgataaacatttaatgcattgtacaaattctgtgaaaacatatatataggatgtgcgaaaagtccctgtgtatcatgtgaaatggcttaaaacagaacaccataggtattcatatcagtgaataccataggtagctgaaagtgttttttcctggggtcgccaagatgaatgccaaaagtgatatcattattataaacaatagccagaataggttggtataaacctggtagaaagccttgataaattgactttctctcctcctgacatcctgccacccctttgctttgctgatgctcatttgtccactaaattaaactcaagcaagccctagtaaagtaatagaatttgtggagtcctcattagtataggaagtttccctgatgtgagattagtaattagagatgtagcaaaatgagaaagaagtaatatgcttagatatttcattttctctgaacctgtatatacaaaataggccatgcgtgttcagtaactattcactgcaaggcactctctaggtactttgggggaattggaaattactcacataaggctatggattgtgccatttgtcaaaagacaaaatgacaacaaatttagtttaaagacctcagtcagctttattttctattctagatttggacagtccttcatttcacaaattggagtaagtgttccaataagttgagcaaaggagcttggctttatagacccaaaaaaagggccaaaggaagcagaaacaaagaacaataagagaattggtcatttcaaagttacttttcttgaaaggtggggacaaggagacagaataatagaaaagtcactgattggttaacattggattaagaattaaaacagaggaaactttaagattgaagtttgaaactgacttgtttgggaaatcaggctgtcttctttcttgatttcttagaaggccggataacaactgagttttgctttggtgaacatgggtgactccatttttacttttagtctggtctgttgaggcctcgtgagagagcttaatctaaaacaatgacttcctataatttttgtttgacacatccaaagagggactctaatatttattgagagcttatcatatcttaagtactgtttaaacacttttatttgctattacatttgatcttattataactctaaaggcagaaatgattgcttttattttccacaatggaggaaactgaggttcaattaagtgagtaaggaagcagggatcttaaacccagataccattgctcctctttaaaggtggaagaacagaaaacatggggcaggggaagagagaaagtttctgtcccaggacatgataatctaaaagggaaaacgtaagatccactgaaacctgaggcagatttattgtggcaataacaaagcttaagtttcacagaccttcatttgcctgagccaactttgaaggccatgtatctaattttgtttttataattctataatctttattcttgaaaagagccctccctccaaatttacaagctttgggcccccaaaatccttgaaatgcccttgaataagagatatccaggtaaatgctatgggaattcagaggaggaagcagttagtatcagttggcggagagttaggctattaagagaaggttttatataggaagtggcatttagaatgaagctttgagaactgagctgtgtatttgaacaagtaaaggtggtgttgcagaattttgctccttagttctattaaaaacccgggttcttgtcacatgatccggaaaatttaggcacacagatacattgaagcatgagtagagcaggattttattgggcaaaaaggaaaaaaagaaaactcagcaaatcgagatggagtcttgctcacagattgaatcccaggccaccacaaaggaactgaagagatcgggcttctcccctgcataaggtgcaaattccccatggctccacccacttccccttagtgtgcatgtggggctccagtccacggtgggcatgcccagacaagccttgggcaggttccctcatctgtgcaaaagcatctgatgtaaacacttgaggggtggttcggagattctctgggacccttttattttcttatctgcctaggcatttggctgtctcagtgggtgggaaagggtgctccaggcaaagggcataacatgaggcaaagggcatgcacagaaaacagtgactggttcagtcaggttgggggatgccaaaggaagtaatgggagacaagattggagcaagatagataagagattgtggattttttttcttttttatctatataaatacagagacagggtctcactatgttgcccaggctggtctcaaactcctggcctcaagtgatcctcccacctcatcctcccaaagtgctaggattacaggcatgaggcactgtgcccaacctccaattttggattttgagagctaaagcaatatagtcgaaaactcagataatccaggtagattttgctattaggtgctatttggttcctggtacagagctaaaacccttggaatttcctaagtgataagagctacaggagcatcttttgttatatgtttccccccctagttcctgaaatagctctagagaaatacaggtgaataacatcctttgttattcatatcaagcccctatcaaccataccccagtttctatttatgaagtggcttttgggaagtccctaaagacaggagtggggaaaggctggttgtcagggggatgggttgaaactttcatcttccccccttgacctccagggagggatgagtggctgaaaattgtgtaaaatcaacaatggccagtgatttaatcaaccatgcctatgtaatgaagccacccgataagccttaactggaactttttggagagcctccaggctggtgaagacattgaggtgctcagaaggtggtattccagagagagcacagaatctctgttccccttcccacattcattttgctatgcatctctcccatctggctgttcttgagaggtatccgtttataataaactggtaacctagtaagtaaactgttaccctgagttctgtgagccattctagcaaattatcaaacctaaagagttcatggatacgtgcaatttacagatgcacagtcagaagcacagatgacaatctgggcttgccattggcatttgaagtgtgttgggaggcagtcttacaggaatgagcccttatcctgtggggtctatgctaataacagacagttgtcagcattgcttggtgtcgaaaacccacattgttggtgtcagaagtattgtcagtaggatagggaaaacagtttgttttctttttttagtggtctttggtcatctttaagagcagggcttctcaaagtgtggtccttgaaccagcatcacctgtaccacgtaagaacttatgagaaatgttcattcttgggccccaacaaagaattaaaaattctgagggtgtgaacggggtctgagtttcagcacaacttcccgaccatgctgatgcattcttgcccaagcatgaaagccctcccttgtttaagaaggccattagggccgggtgtggtggctcatgcttgtaatcgagcactttgagaggacatagtgggaggatcacttgagccctggagttctagacaagcctgggcaacatggcaaaatgctgtctccacaaaaatcacaaaaattaggtgggcgtgtgttgtgtgcctataggcccagctacttaggagactgaggcaggaggatcgcttgagcccaggagattaaggctgcagcgagctgtgatggcaccactacagcctggatgacagagtgagacactgtctcaaaaaaaaaaaagaaaaagaaaaagaaaaaagaaaggaaaatgaaaaagaacgccattaggtataaaggagcaatggtaaaagaccagttgcaaaaggttagggaatgggtggttactgaaataagaagctatgtagaacactagtgttggtggcaggaagtagaaagcaagagcactgctctgtgggggatggtcatagcaaatgcaatatggaggcatttgcctctgcactgaggagaaaactatcttttccaagataggaggaaaggagataagtggaattaaagagaacctttgagcacagagttgggaaactgaaggtatttgtgttgtgctccctcaatcttttaattcaactataagctaaacccatgaaacttgagtagtttcagttatctgacttttttcttctcttttgatacagtgttggctattctgggtcttttgcctctctttatgtacttaagaatcagtttgccaatgtatgcaaaataactggctgggattttgattgtgattggcttgaatctatagatggagttgggaaggactgacatcttgacaatgttgaagcttcctattcatcattatgaaatatttctccatttgtttgattctttgatttcttttatcagaatttagttttcctcatatagtcttttaaaatattttgttatattttgttcaagtattttgtttttgaggaatgccaatgtaaatggtattgtgattttaatttcaaattccaatttttcattgctgttatataggaaaatgattttttttgcatgttagccttatatctttcaactttgctataatcaattattgatagtttcaaggattttttggtcaattattttgaatcttctacatagattatcatcatctgaacttagttttatttcttccttcccaatctgtatacctttatctccttttcttatttcattagctaggacttccagtatgatgttgaaagtagtggtgagaggggatatcttggtcttgttcttgatcttagtgggaaaacttcaagtttcttatcattaagtatgattttagctggagggtttttgtagaagttttttttttttaagttgaagaagtctccttctatttttagtttgctgatttttaaaaagaatcaggaatgggtgttaaattttgtgaaatgcttttctgcaactattgatttgagcactttatttttcttctttggcttgttgatgtgaagtacattaattgatttttgaatgctgaatcaaccttttgtacctgagattaatcccgtttggttgtggtatataattatttgtatacatgttgagttcgatttgctaatactttttgagaatttttgcattggtgttcatgaaaaaatattggtgtgtagttttttgtgacatctttatctgcttatggttttaaggtaatgctggcctcatagcatgagttagggagtatttcctctacttttacatttgagaagagattgcagagaattagtaaaattcctactttaaatattttgtggaattcaccagtgaacccatctggacctggtgctttctgttttggaaggtcattaattattttaaaatagatataggcctattcagattacctattttttctcatgcgagttttagcagattgtctttcaaggaattggtctatttcatttaggttatcaaatatgtcaacgtagagttattcatagtattcttttattatccttttaatgtgcaagggatctgtagtgatgtccccttttttgttttattgatattagcaatttgtgtcacatcttttattttgctttgttagccaggctagagatatctctatttttgatgtttttgatgaaccaactttttgttttattgattttctctgttgatttcgtgatttcaatttcatgatttttaaattatgcttacatttgatttaatttgatcttcttttgctagttatccaaggtggaagcttatattgttaagatccttttgcattcttatgcattcaatgatgtaaatttccctctaagcactgctttttctgcatctcacaaatattcatgagttgtattttcatgttcatttagtttgaaatatttttaaatttctcttgatatttctcttttgacccatgtgttacttagaagtgtgttgtttaatcaccatttttaaaaattttctagctatctttctgttattgatttctagtttaattccattgtggtctgagagcatatattgtataattttaatttttataaaatttgttaaggtgtgatttatggcccagaatgtggtctatcttggtgaatgttccatgtaagctttggaagactgtgtattctgctatatttgaatgaggtagtctatagacatcaattatgtccagttgattgatggtgctgttgaattcaactatgtccttactgattttccacctgctagatctgtccattctttgcagagggacactgaagtctccaactctagtagtgaatattctatttcttgttacagttttatcaacttctgcttcatgtcttttgatgctttgttgctagaaacatacacatgaagaattggtatgtcttttggagcatgacccatttatcctcatataatgcccctcattatttcctcgccctgatgtctgttctctctgaaagaaatatagcctctccaggtctcttttggttggtgttaaaatgacttaactttctttatcccccttacttttagtttatatgtggttttaaatttaaagtgggtttcttgtagacagcaaatagttcagagttgtttttcgatccactttgacaatctttgtcttttaattggtatatttggactattgatattttaagtgattattgatatagttagataaacatctactatatttattactgttttctgtctgttacactacttgttctttgtttatatttttattgtctactctttttctttccattgtggttttaatcgagcattttatatgtttccattttcttttcttagcatagtaattcttctttaaaaaaacattttttagtggttgcccctagagtttgcaatatacatttacaactaatctaagtccattttcaaataatactaaataatttcatgtgtagtgcaagtaccttttaataataaaacactcccagttccaccttccagtctcttgtattatagctataatttagttcacttacatatatgggtatacctaagtatatacattatcatatttatgattgaatatattgatgaaattattttgaaaaaactgttatcgttaaatcaattaagagtaagaaaaatagttctaattttattataaaatgaaataccttcatttattcattctctaatacactttctttctttatgtagatccaagtttctgacctgtataattttccttttctctcttcagcttctttgaacatttcttaccagccagacctactgacaacaattttccccaatttttgtttgtctgatagagactttatttcttcttgacttttgaagaataattccacagggcacagaactctagattggtgatttcttcccctcaaacccttaaatatttcattccactgccttcttgcttgcattgtttctgagaagttagatataattcttatctttgcctttctataggtaagatgttttttcctctggcttctatcaagattttttctttatgaacatgatatgcctttctttttgaacatgatatgcctttctttttgaacatgatatgcctttgtgtcggattttttttggcattattctgcttggttttctctgagtttcttggatatgtggtatggtatctgacactaatttggaaaaattctcagtcattattgcttcaaatatttcttctgttcttttttttcctttattctccttctggtattcccattacatgtatgttacagtttttgtagtcatcccgctgttttggatattctgtttttttcagtttttttttccttcgcatttcagtgttggaagtttctattgacatattctcaacctcagagattctttcttcagctgtgttcagtctaccaatgagtccatcaaaggcattttacatttttattacagaatttttgacctatagaatttcttttgattccatctttgaatctccatttctcttctgcttttcatctgttcttgcatgttgcctactttttccatgaaaacctttagctttttttttttttctttttgaggtggagtctcactgttgcccaggctggagtgcagtggtgtgatcttggctcactgcaacctctgcctcctgggttcaagtgattctcctcctcagcctcccaagtagctgggattacaggtgcctgccaccatgcctgagtaatttttgtatttttagtagagatggggttttatcatgttggccaggcgggtcttgaactcctaacctcaagtgatctgcccaccttagcctcccaaattgctgggattataggtgtgagccaccatgccctgcctttagcatgttaatcatagttgttttaaattcctgatctgttaattccaacatccctgtcatatctgactgtggttctgatgcttgctctgtgttttcaaatggtgtttttttttttttgccttttagtaagccttgtaattttttattgaaaggtggacatgatgtgctgggtaaaaggaactgtagtaaataggcctttagtaatgtactggtaggtgtagcagagggtgagggaagtattctgtagtcctatgattaggttttagtcttttagtgagcctgtgcgcctgcagcttggaagcacttgtgaagtgttttttcaccccttttggtgggacatagtgactagtgtgagcgggagttgagtatttcccttcccctaggtcagttaggctctgaaaaaaccctgataggttaggcatggtaaaatagtctcttttgagggcaggcattgttataagaatagaatgctctggggccaggtgcggtggctcacgcctgtaatccccgcactttgggaggctaaggcaggtggatcacctgaggtcaggagttcgagaccagcctggccaacatggtgaaaccccgtctctactaaaaatacaaaaatcagccaggtgtggtggcacacacctataatcccagctactcaggaggctgaggcaggagaactgcttgaacccagtaagtggaggttacagtgacccaagattgtgccactgcagtctagtctgggtgacagagcaagactccgtctcaaaaaaaaaagaatgctctggcatatttgaaaatggttacttttccctttttttctctgatcttcactgtgagaacctggtaagcatcctataggcaaaattcataaaagtatagaagtcggccagtgacttggacccacttggaattttcttgctctcacatcatgcacactgaatctccagcaatttttcacttacagtttaggttttcctaccctactactggttctctcagaggtttctgcttattggtttctgttttgtaagttgtgattctctgtacctaactgcctgtctcccattttggggggcagtggtttgccctgtgacctcacttctctgacagatctaagaaaagttgtttatttttcagtgtgctctgctttttacttgttacgatgaagccaaccactttcagaatttctacaaaccagatcagaatctggaagtcctgtttttttattttttttatccctttgtttagcatgttacctatcttaacacattttaaataagtgaatgcatagcttatatctacttctaggttatatgcttccttagaataggaattgattcttaaaatgtcgttctgctcacgcctgtaattccagcactttgggaggccaaggcaggcggatcacttggggtcaggagttcaagaccagcctggtcaacatggtaaaaccctgtgcctgcaaaaaatacaaaaattagctgggcatggtggtggccatctgtaatcccagctactagggaagctaaggcatgagaatcacttgaacctgggaggtggaggttgcagtgagctgagatcgcgccactgcactccagcctgggtgacaagagcaaaactccatctcataaataaataaataaataaataaataaataataaaaataaaaaaataaaataaaacaaaaattttattctgagcagtctctgaagaatataaattctactgccttgcctttagaacttataacagcatctcgcaaactatcacaagatgctccaaacatacttcttatgtgctgaattaagaagtcaactcaaatttagtatactagtaatatttttggatatcccaaaacactgccagctcagctttaggctgcccttcttgggggggaaaaaagcagttgaaatttaggacttaagtgggcatctcgtttaatttttaatggatttctatgttgttggttatggtgaagaggtgaaaagaataaatattctgtgcagaaaaattattcagtcttcatgtgaaaacactttgtccatagcaattactttatgaaaaagatgtggtattactttctttgctcttaactgagacctttaatttaaagaacctatactttacaagtttttattttcaatgcatgaaaaatgtagcagctatttcacaacctttacttttaaaatccatttttctttttaatctcaaatagttttttcttaaaaccttttgactttttatctaaattgtaatagccagagcaccttcccacaactagaatatctcatcctttttgtcttttctttttcctctcaaaatgcctactgggaacttaatttggagtcagattcttcatgataaatctggacttaatcaaaattcctcatatggtatattgtatatatcacagtactggatagtcctctgattaaatagatatttgatagtactttaaggtctatacttttggatgaacttaactgctttctccatttgtagtctcttgaaaatacagaaatttcagaaataatttataagaatatcaaggattcaaatcatatcagcacaaacacctaaatacttgtttgctttgttaaacacatatcccattttctatcttgataaacattggtgtaaagtagttgaatcattcagtgggtataagcagcatattctcaatactatgtttcattaataattaatagagatatatgaacacataaaagattcaattataatcaccttgtggatctaaatttcagttgacttgtcatcttgatttctggagaccacaaggtaatgaaaaataattacaagagtcttccatctgttgcagtattaaaatggcgagtaagacaccctgaaaggaaatgttctattcatggtacaatgcaattacagctagcaccaaattcaacactgtttaactttcaacatattattttgatttatcttgatccaacattctcagggaggaggtgcattgaagttattagaaaacactgacttagatttagggtatgtcttaaaagcttatttgcgggaagtactctagccttattcaacagatcactgagaagcctggaaaaacaaatcccggaaactaattattatgtgccagttatataaacaagaagactttgttgggtacaaaccagtgattccttgcctttgaaaaatgtgtcagatatcatgcattaccagcagttcaatgatataaggaaaccagagtaatagctaaaacctttaaagctaaaccaaagatttacaaattgcctcttcatccagtctttcccaacctaaaaactgagttctctaaaaattttagtatttttttctgaagaaaagggaacatggacatttatctaatcctcattagaaatctgactaatgataacaaggatttagacctcaagcacttcttaccaaaattcttgatatgaccttatagcaaattactttcacctgttgaactttcctttcttttattcccctgtacctcacctgcactgggcatattcaagttgcttatacaacactttactattgtgttagaaaaatcatgacacatgatgaatgtgtttgtgcaacatgagctgattcataaatgaaaatgtgcattgaaattccacaatattttaaaattaggagtttatctagcaattgaacaaaattgattaaatccattatttgttagatcagctaaattacataagttcattcatctgctcataaatccatccattcttccatctggctatcccttagtcaattcaaataaatatttatggggcactttgggtaagccaggtgctaagaattcaatgcaaaacaagatagactcccctgtccttgttgaacttatatttttggtacaaacaaaagcaataatcaagaaaaaataaaaaaagtactgattgtgattaataatatgaagaaattcaacagagtattgtacttaacatttgattgatctgattttctcagttgtctgagaacaaacatttgtgaaaatctcattgtagagttcttacgatggatagggggtcaactgtgtcattattgcttatcagcttatcccaaagacctagtttattaccagattgcaaatagtgttcaataaattattcttattaagggttgttatgtactctaaaacatttattgtggtcccttcactggttctggtttacaaacttacttttctatgatgacatagtatagaaattgagagtgaatatttagaagttcatttttattatatatttttgaagtattgatatgtagtgaattagaaatttaaaaagaaaacaaaactgtccttcactacagattgaaaagcattatactaaaagaccatttgctcagttatagtatataaaggccaaatgacttaaaaacaaattatgtaaggagaaggaaacaaccatttattcagtgccactaactgtcagccagttttttcagtggtcagttaatgactgcagtagtgttctaccttgctcaaagcaccctcctcaagttctggcatctaagctgacatcagaacacagagttggggctctctgtgggtcacctctagcacttgatctcctcatgcagtgcatggtgctctcacgtctatgctatgttcttatggtctttaggtaacaagaataattttctttcttttccttactatacattttgctttctgaaattcccttctcgccaatccaggtgaatgtcagaatgtgatttgacaactgtccaaagtactcattcactgaggagtggtaaggccttcgcccaacctgccttctctgggaatatactgctgcctgaacatatcattgtttattgccaggcttgaacttcaccaaattaatttattagggtcaacatctaaatattagaactatttcagattaatttttaagtcgtatccactttgggtactagatcaaattgcaggtctctgcttctggcttgagcctatgtttagagatgatgtgcatgaagacactctttgcttttcctttatgcaaaatgggcattttcaatctttttgtcattagtaaaggtcagtgataaaggaagtctgcatcaggggtccaattccttatggccagtttctctattctgttccaaggttgtttgtctccatatatcaacattggtcaggattgaaagtgtgcaacaaggtttgaatgaataagtgaaaatcttccactggtgacaggataaaatattccaatggtttttattgaagtacaatactgaattatgtttatggcatggtacctatatgtcacagaagtgatcccatcacttttaccttataggtgggcctcttgggaagaactggatcagggaagagtactttgttatcagcttttttgagactactgaacactgaaggagaaatccagatcgatggtgtgtcttgggattcaataactttgcaacagtggaggaaagcctttggagtgataccacaggtgagcaaaaggacttagccagaaaaaaggcaactaaattatattttttactgctatttgatacttgtactcaagaaattcatattactctgcaaaatatatttgttatgcattgctgtcttttttctccagtgcagttttctcataggcagaaaagatgtctctaaaagtttggaattctcaaattctggttattgaaatgttcatagctttgatagtgtttttcagaagaccaaatttacagtgggagccttgggcttttgttttttaacagctcttttttgttcctgcttcagtggcctgacctccaagttagcaatcgccaggttgagaaatgctttgcgagacataacagatgctcctgaaataacaaacacttggaatcatgaggtagtggaattgaaaatagaaagtgtagtgattgttttttgttatttggatgggatgaacaatgtcagattagtctgtaactatttttttttaatgtcactctgatttggtcacaaaggatctctagtctcattgccttagtatcattctacgaattagaatgtgttactgtgtaagagcacttcttgtatatgagagaaatagcaacagttccagtttaaagtgatataaatggaaaccaagaaatgtctttactgggaccaaatctggacagcatttactgtatttttgctggtattttctctagtctttccgggtatattcacatttaatgatcacttttctccctttgtgctaatggacactgaatccattccactaccatagttcttgctaatactactctactttttacacaaaattaaaatgccaggagcacctccaggtagactgactataaatctagactgaaaaaaaagcttgtatttcttaacagattaccttgtggaacatttgctcctttcaactaatgaggcactaaatattgtaactgctcaactggtgcttttaatttatttgtctagactttgtcatgttgccagaagctttatcctggttggagttttgaaaacagtattgtttcttcagaaagaaaaaagggattgtcagatgatctaaaaataaagaaacactggaaatacaagtatcccaaggtgatagcattaggcaagataaaaatgttgaaaagcgaaaaagaactggttgatagagaagtgttgttattcagtagaacctaagtcttgtggtcccatttttaatgaaaaatggtgaattttttggtttttattgttcttgttcacacaaatctgcccattagaataagccaagccctaaaaattaatttcagtttcactgggaatcctttagtttatctactatgtagtagagaggttttgttttattgcatgtttgacgtaggaacgtatatatgcaagacatggaggaaaaccaagtgggccagagttttgaaaattctttatcttttctttctgccaaagtgagtctcccaagtttgtcttttttttttcatttccactcttctatggtttctagcattatataaaccaaacaaaaaaaatacgttcagagattccttcagaaatgctggatgatcttgatatcgatgcttttcatatatgtgtttatgatgctggtttctggggctggctctcagtatcacaaagatgtctgtaaacagaatatgctatttcttctttgtgacaaattttgaacattatgtgaatgtccaagaaagagcaaaagagggcaaacttctcatacatttttgatgtcgaaaccaagagacgcttttattttcctaacttttctttgaaagttcaaattaagtaattttatcctgtcctaaagtttaaaaagaaaaaaaaaaggaagaaggaattaaaaatccaaagaaaattatgtttgtttgcttttctgtttttttcttccttccaactccgagactttgcaagggcatagttctgaagatctctgacactgagacattagagatctctgtatcaatggatcatttgttttcagacatatgaaacaggaactttgaacaagaaatttcccctctttttctcatagtgatcctgagacatcagctgtggaatcacaacacgtcattagttttggcaggtccttgcaggtgttttgttttgttttattaatgttcttccctcctgtagctagacagcaatcttggagaatctgccagcttggaagactattgtgtaaatttcaaggtggagcctcctttaatttgttctgtgttacctgtgagctgtgaggtcatgaagaggagacaatgaggctaatcatgagagccccattggtttaggcaattagaacaacaagatctaaaatggtttattagccttgaattgtgttaagcacataattcataaaaaacagaaaaaatatttttaaatgtatgtctaaatcttcagttacaagtttgaaaggtgacaaactattctgaggaaatgattaggcctattcttgcaacgagtctttatgatctgaaaagaatctatgtccacacataactcccacctcaaagatggggcatcttttgctctgggagatatcaaatgcgaccaaaacaagtgtttgtagatttgaatgatgattcagcagtgtagcagttctcactcattttataataattaacaacttaataattaattattaaactcctacatgcttaacattataagtatgataacttctgtggttacataaaagatatacatagcacttgtccttgatctgtcacagtgaggtcccaatccaacctatgagcttcaaatgaaaagttcaaaattacactcattgtcataagtcagagatcaaaggaagaaaggatttaaccaaaatgataaattaaatataggtgattaaatatagtcatggttcaaggcatgggccagttagggagtgtgatgtgggtaattatgaaaggccagctcccaagccctgttgttgctactcccccacatcagtcatccttcctttttttctacttctactgcagtgccttcctcatcttttcccttgcatccctccattatatgagtcatacaaattagacttttcaaagcaacattaacattgtgtgaatttggggtttttgactaatcccaacattccacccccacattccagtcccacatgggatttggagccttgtttataaacctggcacttctaatatatcttatcttagagtaatccttgtatttgtttaatttccacttagcattgtaaatacttgcaggtatcctagttaagaaagcaaggtttaaacacaaaatcatcaccaattaaagcaggctagataaagaatgtaatagaaatgctagataaaacagattttttcttactaagttttctgtcccttatagagtgcataacacaataacttgcttgataagaattcaatgtacattgttttgtgctgaatcactaaatgcttgatttctgtaacaagagattgtggttccatcagtatctggattttagtctgtgtaatcttaggcaagttatttgatttctctgtgcctctgttttcttgtctgtaaaatgagtataatggtagtaactaattcattgtgtttttgtgaggattaaatgagttaataactagtactcctccctggcacatagtaagtacaatatgctgtgctgtggtggttgttattattttttatagttccttgagcaaaagaaataatgtccccatcttagtataatattggaggtatataccatagaagtgaacaaaagaatatagtttcacaaagaaagtgataattaaggcggttcataaagggtcataaagcttgtagattttagaaatgtgggggcatgaggatgtggagagggtattccaggatgccagacagggagattatggataagtactaagatgagaactagaaaaagctgaggggcaaaaggtcagaggaggccacaagttagggagtattaggaaaaagaagttaatacttgacaagtgccaacatggcttcacgaggaatgggttgggcctttttgagtgaggaagaggctggtgaaagggtggtggaggacactgctgctgctgatggcatggggtgtaggtggcaggagaggcagggacatgagctaggaaactctccagctatgaagtgatgagtctggagtaatataaggacagtaggggtggagtgctgaacttaagggaggagagaaaaataattggtatggaagtaggtacaatgcaattttattatttctgagcctaaaaatgtgaaatttttgattatttggtcagaccagggaagtattttcttttatgctatctctgaaaatgtatacactaaaaagttgtagtataaaaaggttgtaaagcattaagtaattttagaggaaacaataatttggatattttacatgcaatcatttatatgcaaatatatgtaaatattacaaaattattctctatttgttacaaaccttaaatatttttgactgaggaatattttattcatctaattatagctactttgttctaactaatagatattcttgaaaacaaagcaacacttttttggagacagagtcttgcactgtcacctagacttgagtgtgttaccttgaactccagggctccagtgatcctcccacctcagtctcttgggtaggtggattacaggcccacactaccatgcccagctgtattagtccatcctttcattgctataaagaaataccggaaactgggtaatttataaagaaaataaatgtaactggctcacggttcttcaggctgtacgggaagcatagcagcatctgcttctgaggaggcctcaggaagttttcaatcatggcggaaggcaaataagaagcaggcatgttacacgacgaatcaggagcaagacaaagtgagggaggaggtgccacacactttgaaatgagcagatctcatgagaacagcgccaagaggatggtgctataccgttcatgagaaatccacccccatgatccagttacctcccaccaggccccgcctccaacactgggaattacaattcaacatgagatttgggcagagacacagatccaaaccataccaccagctaataccaaaaaaaaaaaaaattttttttttaagacatggtcttactatgttctacaggctggtcttaaactcctggcctcaagtgatcctcccaccttggcctcccaaagcactgggaattcagacatgagtaacagtgcctggccaatacttatttttaaacattctctaccataaacttaggatcttgatttgttcacattgaacagatttttattatacagattgaatttataagaaaatgttgcagacattgtcaaaaagggacgtccaaaccactgtgatatttataagcatttgggccacattttgatagaactatacacggagtgtgtgtgtgtgtgtgtgtgtatatatatatacacacacacattatttatatatatgtatatatgtatatatatatatgtatttatatatatatgtgtatatgtatgtacacattatttacctacctactgtgtgagtgtgtgcatatatacacgcacacacacacacacaaatatatatatttcccttctgagacaaagccaaacagcactgtatgcttaaagaaaaacagtcacacttcccacttatgtaatttatattacatccagtcaccacaccagccaaactgctttattgttttttgtttgacatccaatgctaaagcataatgcctgttgcagtgaaatatacatgagcaaccctgagaactcaatatagcctcacgtgttgccactgagttgagttgaggagtcaagctgtagcaaaaaggtttgtcaccgggtgagtaatggtgctcttatttttctctgggtctcaagaagtgctctttatgacatatatggcattaaataaatatcagatatttgcacatcctaactttcctattggtgaagtttcttaaaagagagataaagggccattgtgtgattgatagtttcaggtatatttttgctgcacagtcagtccgagtgtaccacgtagggcaaaccacgtaacttctcagggccttgactgtttcatttgtaaaccagagaaaaggacttgggtgacctccaaagacctttcaaatttggagatgagtttgtggaaagttcaaacagtttagaaaacagaactaagacacccactggcacccctggaagcaagagagtgccaggtactatttgtaatacaggaatgaaatacctaattgtatgaaattgaattctaactgaaccagtttgttcagttaaattttttttttcaattagagtgcttacttcagtatctaacactagacagtaaactgtagacaaaagacctacagaatttctgaatggtatcaaattcaccacacttaaaactttgggatgtctaatttcaaccaacagctttctttcttcataatgttgaatatatgtgtatctattttagctaaatttaatatatatcaatatactttgatagatattttatataaactattagactatagtattatgagtaaaagacccaccatttcccaagcaattataaagaacgatcaaaattttaatgggttgttagtattatttctttaaagattgtgatactgataaatatttggccacattttaatagaattatacatgggatgtgtgtgtgtgtgtgtgtgtgtgtatatgtgtgtgtgtatatatatatggcagtagagatatatatatctacacacatctagatatatatatacatgtatatctatatatacacacatatatctgtgtgtatatatacatatgtatatatacctacatacatatgtacatatacatacatgcatatatctgtacatatatatatagtgtgtgtgtgtgtatatatatatatatatatatattttttttttcctgagccaaaacaaaatactaggttgtaatagctgttctttcagaaggaagaaaaacaacatgtgctgaactctgagtttgatgtttttgtattttacttcctattttcatatcagtccatttatttattcaggaagaatttattgagcatatattatgaacacagcttttgctaaggacagggtatgcagcagttatggcctagtaggagatatggatgttaaaaacaaaatgctcacaaatgcacatataatcttaatactcattgtaagctatgaaagcagagtgtgagtattatgagaccatatgttgggagattttatttggtattgaggatcaggaaagatacccctgaggaagtgatatttaatttgaaacctaaagaaagcagttggccatgggaagaaggtagggaatgagattcccaagcaataggaatccaatgtgtgaagaagctgagggagtgaaagaaagctagtgtggtggcaggaagaaagagaagagaatggagaagggcactaaatgagtcagagaagtaggaggggctaaaccatgtagggtcgtgtaggccatcttaaaggcctgagtgtagtggaaaacctttgaaggtttgttaaaaggtcaatgaaatgttctaatttctgttgtagtgaattgctttgattgctgaatgcgaatggatgggtagagatgcaagagtgaaagggaagaaatcaattaggaggctcttgccctgctccagataggactgataattaattttatttgggaagatcagggagaaagataagtcatgaatgactcccaagtttctggattgaagaaatgaaggtaccatacactgagatgggaaagcctaggggtagagtagctttgagaagaaaggtagcatttccccatttcataaaacatggaagaacaaagaggctggattcctgtttgtagacataccttccaggccagaactgcattactacaacatctttgcaagccacattgcctttcataactctgtgtcagtgttgatgccgtaacatctttggccttccccctaccatcctcccgcagtcctccatgataatgccattattccgtttcaaattgtgtgcttccattggatgtgtgagtctccttgaaagttataatgaggctgtagcccatatgaaatgcttcaactcaggtcctgcataggaagaggaagctaatctctccaggaactgagcctgtggctagagggatggataattgtttaaataaagaatatgctgctgagtactgatgggctctttatgtacccatttggctgctgctgcccaacctttaatctttcctgagctttaaataggaaggaaaaaatggtccacaaaggatttgagccattttgctgtggtgatgaggagcacgggtttagagacaaacactcctgtgtttgaattccagctcctactatctcctagctaagtgaccttggacaagtcacttaccttctccaacctgctgtttcttcatgtacgtaataggatttacctcatgaggttgacatgaagattgaaagaggtaacatatagaatgagcctgtcccaggacatggttcatgataagtctgccataaatgggagctatgtgtcccacccttttggaggagataactgttctgtagcaggtaatatattgtttgatacttggttaacccttacaattatcatttcctgttcttctcaataatgctagaaaccttttatttaaagaaccacaatataaaatgaaaaatatataaaaaaagcaaatggaaaaattctattggcaaggctttttaactttatatactaaataaatccaattgcttaaataatgaactgactcaagttctcagcactgcttcttgtttaattctctttagtttttcagaattctccaataatgacctttgtctactctcttcagtttattcagaaattacttttatttacatagaagtttggaagtggatacacaaacatatccctcacatatcttatgatcctatgagtcatatactcatctcttatattccctctgtaaagcaatgtaggtacctttcaggaaggtgatttttatgtaggttgagaaatatcagcatggaggtcctagctgacctctctagagagtttctgagacatttgacaacaactttttctttaagtcatcagttatgccccggggtatgaaatttctaacatgatcctcagtaaacttggctgccttgctgaggatactctccatctgcctgagagacacagacaccattaattgggaattgacttgacttgtgtggttccttgtggaccagatggccactaaatattctcatttcaaggcaattggtaaaaactacacttcaagaaatttcattcttaattccccttagtggatgttattaaccaaaggcaaaagaaaaaaagggtaaaaaaaatattctaaatgttaatatcaaaaatattattttcaattcaccccaggcacagagaactaagtattattattgctattgcaccggcattccccaatgagacagtgattttcttttaagacatttttaaataatataggcagaattaagtagacggtgatctggtaagtagatgtttcagggtaacagctgtgcaatgctccatgcagggaattagattgtcattttattccttaccaggaacatacattcagttaaacaattatttgacttctgctcttccactgatttctaagttgaggctctctcttgtgcctgtctgatcagataagtagagttgtgccttggtttatagatgagataaatgtgtatttgaataagcataagttaaagaaattttaaaatcccttaggaagctaggcttatcagagaaatccaaggaaatacattaacaaactaggaatttgttctaacaggttaattataactcataaacttattgggtttttttaccttttaattttatattacatttgcttataataaggaatattgctaggaataaaattttttaatattctacaattaacaattatctcaatttctttattctaaagacattgggattagaaaaatgttcacaagggactccaaatattgctgtagtatttgtttcttaaaagaatgatacaaagcagacatgataaaatattaaaatttgagagaacttgatggtaagtacatgggtgtttcttattttaaaataatttttctacttgaaatattttacaatacaataagggaaaaataaaaagttatttaagttattcatactttcttcttcttttcttttttgctatagaaagtatttattttttctggaacatttagaaaaaacttggatccctatgaacagtggagtgatcaagaaatatggaaagttgcagatgaggtaaggctgctaactgaaatgattttgaaaggggtaactcataccaacacaaatggctgatatagctgacatcattctacacactttgtgtgcatgtatgtgtgtgcacaactttaaaatggagtaccctaacatacctggagcaacaggtacttttgactggacctacccctaactgaaatgattttgaaagaggtaactcataccaacacaaatggttgatatggctaagatcattctacacactttgtgtgcatgtatttctgtgcacaacttcaaaatggagtaccctaaaatacctggcgcgacaagtacttttgactgagcctacttctctcctcactggtatggctccaaccatcaggccctatcttggtccatttaggctgctaaaataaaataccaaagactgagctgcttataagcaatctttggaggctgagaagtcaaagatcaaggtgccagcaggtttgctgtctcgtgagagcatacttcctggttcattgatggtgctttcttgctgtgtcctcacataatggaaagggcaagacctctctggtgtctcttttacaatggcactaatcccatcatgagggctttgttctcatgacctaatcacctcccacatgtcctacattctaatactatcaccttgggggttaggattttaacatatgaatttgaggaggtggcgggggggacacaaatatttagaccatagcatttcactcctgacctccaaagttcatgtcttcttcacatgcaaaatacattcattccatcccaatagcccccaaagtcttaacttgttccagcatcaacttacaaggctaaagtccaaggtttcatctaaatatcagctaaatcagcacaaacagctaaatcaggtagagtgggacttaaggtgtgattcctctttaggcagattgctctccaactatgaaattgtgaaatcaaacctattatgtactttcaaaataaaatggtgaaacaggcacaggctagacagtcccatttcaaaaaagagaaatagaaaagaaaaaaggagtgacaggtctctataagtctaaaactttaaggcttgagaataatttgctttgctttgcctccaggctcactggggtggtgtcttacctctggacacactggggtggaggctctatcctcatggatttgagtgtctcattctttgtggcaggtctgtgctccaatcccacacctatggctccctgagtgtgcaattgcatgcctggtggttctactggtctgggattgcataggtggcccagccttcatagctccactgggcattgccctaatgtgggctctatgtggtgacctcacccctgggcctctacctgggccctgtgactccctgggttcttgaaatctaggtggaggcagccatccccctacagttgtgctgagtgtagtgcatgagtgctggggtctgctagagctatacctagggtggtggagatgtatggcaatggagtatggggagctgatatggtttgggtgtgtccccacccaaatcttgtcttgaattataatttccataatctccatgtgttgagggagggacctggtgagaggtgactggatcatgggcatggttttcccatgctgttcatgtgatagtgagtgagttctcacgagatccaatggtttcataaggcagttttccctgctcttgcaccctctttcttgcctgtcaccatgtaagacataactctttcccttccgccatgattgtaagtttcctgaggccttcccagccatgtggaactgtgagtcaattaaacctcttttctttataaattacccagtctctttacagcaatgtgaaaatgtgctaatacaggagcaaagactgcagtgtgaggtggcaatgtgaagtctgcaatgtgaggtggcacggggcagttgtagcccctcctttgaaatctttcttccctaccccaggcctctgcactctgaactatgatgggaaaggcagcttggaagatctccaaatggctttggagtcattcttccattgtcttggactataaattctggcttctgtttaggtggctgactaatatccccactgtctgaatgcatagcacctagtttctgttgagatggctagtccatagtaatttacttatcaaatttggccacaccctttgtattctctcctgagcaggctttctcatctttcacaatatggataggctgagaattttccaaattttgaagttctgcttcccttttgatcaataattccattttaaagtcatttctcatcttgaattttactatgagcagtcaagagtaactaagctgctccttcaactttgcttggatatttcctcagtcaaacattcaatttcattgctttcaagttctgccttccacaaaacactaggacacaaacagctcagccaagttctttgacattttataagaaggatagcttttcctccattgtccaataacatgttcctcatttccatctgaaaacccatcagattggcctttaccgtccatatttctgggaacattctgctcatgaccacttaggtattcggtaagaagatagtagctttctctatagctctcctcctctctggagccctcaccagaatggcctttaattgtccattcacagcaatgtaggctttttctagcatgtacctgaaaactcttccagcctctactcattaccttgttccaaagctgcttccacattgagtatttgttacagcagtacccagatcccagtaccaatattctgtcttagtccattggggctactacacgatgtcttataaacaacagtaaaatttatttttcacagttgtggaggctgggaagttcaaaatctggtgccagcagattttgtgtctggtgaaggccttcttcctcacagatggctgtgttctcactgtgttgttacatggcagaagagtgggcaggctagctctctgggatgtcttttataagggcagtaatccaaatcatgggtttagggtagagccctcatgacctaaatcacctcccaaaggccccacctcctaataccagcatctttgaagttaggatttcaacatatgactttggcagggggacagaagctttcagtttatagcaaaccctataggtagcactactttgtcctttcctaatcaatttgcgtcaatgaaacatgaattagaagagacctaggcgactccactatactgggattattcccagtataaattatcatctctccacaccttctcatctactccctatctgagttctgaagctctccactacaagaaggaggctttggtttgacttgatatacttctctgggaaacaggtttagcataaaacagtgatgctcattctagaacacctgcaaatgacaatagttttctttcgaagtcgccaggaatcgtctgcctttgggtatgtggctgtgagcactgccgggcaaaatgccatatgacctagatgaggcatatgccatcctttgaagccattaggacattatataggaaatatattaactaaaatggaataaaattttctaaataacaccttatgtttatccaacaggtggttcattatacttgagagcattatacagaggaatttgatggggaggagagctggagaaattctcgaaattctgggtttctttaacagaatactctagctataaacttataattttaaaaaataagcattatattaaagaaaagggaacataaattattttgttttattaaacttaagtccaaaggtctggattgtggcagaataggatcaggggacctaaaatgttgagcctcaaaggtcttcttagagaacaactgtattccactattagcgcttttggtccttttagcccaatttctgtttatcccaaatgttcttcccttttctgccttccttcacagtggaccctgccaggagctttgaaatgcctgtgagtgttaaacacttacccattgagtgcccaaccttaacatgcccctaataaaatgtacttagattaaccgttttcattatcaaagtttccttattacccaacaaacacaggcgctttaaagaaaacattaactaaattgcaagtgacacattttaagatctttgatatgacttcagagaatgcactataggaacacaatgcaatgggagggaaacttgggagggaagacattagcctttataaaatctgcaagtattgccaaatcaaaataaaatttacaggaaagcaggatcataaatataatctaaaatcttagaacctgtggttatgattttaaatactaatacaatgcaaaatttttacctgtttaggtttttatttcatcagttcatatttaggtatatacttttactgttctccttttttataatttaccattcacaaagatgatgatgttagtctaactttaatgtcatgagtgctttgagtagtagtgctaagtttttgttgagtagtagtgtgcttttttgattagtagtgataggtttttgatgagtaagcctgctagcagcatacaaacaaacaagcaagtatcagcctagagaagcagaaaaggcatttgggtttcaaagtcacaaggcctaggctttagtctaatacagctgataatacaatttgtccaaacaggacatttttgggtgtgtcaaacactaaactggacaggacattatgacaaaagtgcaaagcaggactttccggggcaaaccaggatgtatgtcatctcactgagtcctctctttgtccttgccatgactagtatctctagaggtaaatgaacagagtaatgacaaatagccagacacctgaatcttatcccaacagcacctcctacataattccccattatcccaaatggaaattaaaaatatatacagtgataattccaggccaagaaatgctttatttctagcttggacttggcttccatgtccagtgtagaatcttatccttgctgatctggactgtatctcatgaagccatgacttgtacctagttactagctggaaggcttagaacaaaagctggtccagagagcctcctttttccttatttcctgggtccacacctttaccatggcagtctgcctatcatttgatggaggaatttaaagcaagtccaagggaagggaagagagtttctaaaatctagaacttggatagtttaatttacctatcccaaaacagcttaggcccagacagcttctctccaagattggtgccaaactgaaattaccagctgtgtagaccaaagagaatttcaaaagaaactgaatcccaagagaaaaaaaaaagacttctggcattgtggcccaataaattggtaggattgttgtgacttttcaagtttacatgtaaaatgggcccagcgcagtgcctggcaaatatgggtactaagtaaaagtaactataatcatgtttttttaatctggacttcacttggtcatcctttaaatggtgtctgacagaatcctagttcttgtctcactttacttagtttccctgggaaatttcatgtgtccttttggctttaattaatatctctattttgatgacctccattatctgcctattcccagagctttccacctgatatctcagcacatgaaaagcaccttatgtcaataagtgagttccttccctgccccaccacatacctgtcctgtgttcctaattccactgaatggcatcccatcctccagtttcccaaggccaagacctgggactcatctttcactctcaagttcctccacgggtacccacatgtcacatcctgtcaatgctgtccctggggagtatctgaaatatattcacttttcttcatttccacctgacaccactattaacacttgcacaaatttctgaggttcctggctcatttccctcattgacccccaatagttcattctgctctttgcagctctggtgatctttccaaaccccacatctgatcacttgtttcttcccttcatatggctccttaatgccttctggactaagtccacactgcttaaggtggcttaccaggtccttcatgattttgtctttgtttggctttctacactcactgcccaacttccccttacttcccatgattcagttatactgaatttctttggttctctaaagcacatgtgctttctgttctgcagaggcttttttgttcacttgctattctctacctgggaaactcccccagcccttcactgcctccttctaccatctttcaggcctctccttacacatcacttctttccaaaaatctgccttgacactccaggtctcggtttcctaggtgtaccctataactccacccctttcatagcatttctcactctggctggagatttaccttttaacttgtccatgtcccccactggagtggaagttcctggaggtcagggattatatcctattaattgttgtatttccagtgcctagagtagtcttgcatacatggatggtattcaataaatattggttgaatgaataaggagttctttcatttcatatgtaatagatcatggaaatagccttgtgattgatacacagcaggtattaccatcctcactttagaatgaggactcagagccttgagatgtctgagggccttgactgggacagctggcagatgcaggagcagagctgcatcacccctgtgggctatctcagggttgtctgtaatctaagtacaatgtctgttgattttggactgaaggctttttgggtaattgtttgctttttcaatacttataaaatagtttccatccttactcattgatagtaaggttagttattttagaaaacaagctaaatagcagaaatagtggccttttaagttgaaaatttaccctgaaaaatctacagagtagcaaacagagtatcaaaaggagttgactgtatctatttttataactgccacttatggattattcagtaaaaccacaattcacttttatgattttttttcatgtttctctgtcacaagagcaaactcttgctccataataacattccagaatacagcaatagcaaaagtcaacattttgaatcctttacaaactcttagacatttttttttttttagtttaacatgttacaaaacaaaatttcttcttttttcacagcagtttgggaagtacatactatttattagctcatcagcatgaagctggaaaattctttttcctaaagttctttatatctacaaactgttgatgttttcatttatttatttttaatgctacgttgtaatgaaaatcattggaaaactttagattctagtaattttgaagtcttcttagtttggacaggactgagctaaagtttgtactttttttaatttattgaaaaatggtttctaatgatagtattaacaagattatattgggggcaggacgcagtggctcacacttgtaatcctagcactttgggaggccgaggcggttggatcacctgaggtcaggagttcaagaccagcctggccaacatgtagaaatcccctctccactaaaatacaaaaattagctgggcatggtggcaggcactgtaatcccagctacttgggaggctgaggcaggagaattgtttgaacctgggagtcggaggttgcagtgagcccagatcgcaccactgcactccagcctgggcaatagagcaagattctgtctcaaaaaggaagaaagaaagattatattggggatatatatgtgtgtgtgtgtgtgtgtgtgtatatacacacacatatatatatacatatatacatatatatacatatttaaaggataaaggattctgctgccacagatcactaaatcagatgatctctagcaatttcctgtttgtttgttttttgcccatagtgcttatctctttgaacagtaattttccacttactatttttctccccttttggaccataatttcctttaaggcagagcctcctgttactcatctttgaatctggggtctgtcagagtacctagaatttaataaactctcattaagagccagttgaaagaatatatgactaagcagtcatttacatccaaaagatccgtaggagaattcttatcagcacatgtgattggtaacaataactttgtacttttcaaaaacaattactaatctatcttgctttccattatctcaccaaaacctattagcatgtctggcagaaaatagatacttaataaatttcttaaatgtttactgacttcaattttaagttttattaactatgttgacttttctctaatgaagatgattctaaaaagctttttactatacttcacagtgaataaaacagtgagataggaatattgcaaaatgtcccctgtgttggtcagtcttagtgtcattcattttaaaaattctgttctctaaatattgacagttatatataaatttatgtaattgtttacttctaataaagaatttcatctggggaaaaacatactttgctcagctctttgccacaagtgcaaagtctaagacagtcaaatagctttcctagtacggccttaggaacttagtatatgactggtgtgaatctagagggagcatactgcattctgaccaaaatctccaccctgttactatggccatcactaacttcgcagtattgcagtacttcctgctagcttagttcccaaggcaacttgtgaaggaaaatttttacaaagctgttgtcacacaaaggtagtgtttcagttcctgagcccatgtccttggagttgcccaggctccaataatactaataattactgtacattaggtacttaccatgtgccatattctgtgggagccgctttccacaaattatctctggtaatccttgtaacaaccctttgacatcaatattattattttctccatttttttacatatgagataaatgagacttaaaataatgtgcctgatatcatcagcaaatgagctgaggagggcagattcaaagctgattgtgtttgactctagagctgcagtcttaagccagaccttttcttgctggttaattttactgaaaaaaaaaaaaaaaaaaaaaccctcaaatactgctgattgatctaaagtactaacatttctatcagtgttagggaaattttaattttataatttgattttgtgagaaatttatagcatcttgaatactcacatgcaaagtgatatgtcttagataacattttacaatggcagagcttaagccagtgctcagtcattcattcatcctcaagttttgattcatttatcattcatcaaaactctgttttgtttggccacccacattctaggagctcagtacatatttgataaatgaatgaattgttgaggttgacagttacccaggactggcattaggaacacagagctgaagagcacgtttttaccctcaagaagcttacagtctaacgagggaacttgcacaaatactactatcactaggtgcctggttgaatggcttaagagatgatcagggatattcagaaggatatgtcaggctcagcaatggcatcacttgagagcatcaaggtgtttagggaactacaagatgtttggttctgctgggaataagagtgaagggggctccatttggatgcctcatacaccaggtgagagatcttagattttattccaccaggaggagaactaccataggatttaaaacagaaatgatatggtcaaacctacatcttaggaagatccctggggtgtttgtatggtggacttgcaatttgactaattgagatttgtaggatgattcttaagagatgatgatgacccagactgggatcactataatagagttggtaaggaggagaatgatttaaaaagtagttggaagaattctagggatggagataaacatttgaaaattattaacttataggtggtcatcaataccctgaaaatgactgggatctcagaggagagtctggagagttggaaatgacaaagactaatattcaagggggcaggaagagggagagttgttcacacatgacaataggaagaaatggccatagagtgtgtggtttctctcaagccaaggaatagatgttttaagaaaggaaaattcttgtggtgggaagcagtagagatgacagatacacattaatttcttgagatttctagatgactaaatgggcagatgttgaatgatagctaaaggagaacccagaaacaagggagggattttgtttttgttttttaaaaaagatagaccatagcagcttcatagactgaaacaataaaaaagttgaaggcacaaagaaagacacaggtcctctaactccctgcccagtgccctttattcatattctcagcacttgtatttctaagttttatgtttgagtcttcggggatacatcagagtagtcccccttgtctaataaatgtgtttacatttcctgccataccagaaacccttctcaaactttaatgaatttctacaaggtgagattactttaatgagaaaccaaccaaggaaaggagtatcatctgcaatatactttcaaatgttttttgcttgtttgtttcttgtccagctaaaaaaaaaaaaaaaaaacaagccattggtcctaacacaactttcatattctaccccaatatcaaagaggcttaaaatctcctggtcgtgtgatgggcacacagttaattttttgtgaacaaacacagtgttatgggccatttctgaatttatctctgaaatcataagattctttctgagccattatctcattctatattacagtcaggtggagcccatcttacctcctcatactaaattctagacttctcaagggcaggagacaatcatctgtatatctctttggccttcatacactcaggagtacttgccaaaaataaacatttaatgcacatttatttgaataattgataagatccaatacttcaataactttgtcatatttttatagaatgggtttctatatctcatttgcattttcaaactttacttttactgtctagctttaaaaaaaaagcctttgactctaatacagccctcatattctaccccaatatctaagaggctttatatctcctagtgttgtaccactattttaactccagtattttttacttcatagttttacctatttgttacagttagtttttatgaattcaagagatgaatagcaattttccatatgtaatttaaaaaaccccacagttgactattttatgctatcttttgtcctcagtcatgacagagtagaagatgggaggtagcaccaaggatgatgtcatacctccatcctttatgctacattctatcttctgtctacataagatgtcatactagagggcatatctgcaatgtatacatattatcttttccagcatgcattcagttgtgttggaataatttatgtacacctttataaacgctgagcctcacaagagccatgtgccacgtattgttttcttactactttttgggatacctggcacgtaatagacactcattgaaagtttcctaatgaatgaagtacaaagataaaacaagttatagactgattcttttgagctgtcaaggttgtaaatagacttttgctcaatcaattcaaatggtggcaggtagtgggggtagagggattggtatgaaaaacataagctttcagaactcctgtgtttatttttagaatgtcaactgcttgagtgtttttaactctgtggtatctgaactatcttctctaactgcaggttgggctcagatctgtgatagaacagtttcctgggaagcttgactttgtccttgtggatgggggctgtgtcctaagccatggccacaagcagttgatgtgcttggctagatctgttctcagtaaggcgaagatcttgctgcttgatgaacccagtgctcatttggatccagtgtgagtttcagatgttctgttacttaatagcacagtgggaacagaatcattatgcctgcttcatggtgacacatatttctattaggctgtcatgtctgcgtgtgggggtctcccccaagatatgaaataattgcccagtggaaatgagcataaatgcatatttccttgctaagagtcttgtgttttcttccgaagatagtttttagtttcatacaaactcttcccccttgtcaacacatgatgaagcttttaaatacatgggcctaatctgatccttatgatttgcctttgtatcccatttataccataagcatgtttatagccccaaataaagaagtactggtgattctacataatgaaaaatgtactcatttattaaagtttctttgaaatatttgtcctgtttatttatggatacttagagtctaccccatggttgaaaagctgattgtggctaacgctatatcaacattatgtgaaaagaacttaaagaaataagtaatttaaagagataatagaacaatagacatattatcaaggtaaatacagatcattactgttctgtgatattatgtgtggtattttctttcttttctagaacataccaaataattagaagaactctaaaacaagcatttgctgattgcacagtaattctctgtgaacacaggatagaagcaatgctggaatgccaacaatttttggtgagtctttataactttacttaagatctcattgcccttgtaattcttgataacaatctcacatgtgatagttcctgcaaattgcaacaatgtacaagttcttttcaaaaatatgtatcatacagccatccagctttactcaaaatagctgcacaagtttttcactttgatctgagccatgtggtgaggttgaaatatagtaaatctaaaatggcagcatattactaagttatgtttataaataggatatatatactttttgagccctttatttggggaccaagtcatacaaaatactctactgtttaagattttaaaaaaggtccctgtgattctttcaataactaaatgtcccatggatgtggtctgggacaggcctagttgtcttacagtctgatttatggtattaatgacaaagttgagaggcacatttcatttttctagccatgatttgggttcaggtagtacctttctcaaccaccttctcactgttcttaaaaaaactgtcacatggccaggcacagtggcttacatctgtaatcccaatactttgggaggctgaggtggggggattacttgaggccaggaattcaagaccagcccaggcaacatagtgaggccccatctgtctttattaaaacaaaacaaaactgtcacagcttctttcaagtgatgtttacaaattccctatggtttagtcacaaggaagttctgaggatgatgtatcacgtcatttctgttcaggcttttgagcctcctggaggtaaatggtttccttactgaaggcttgttattaccatgattatcactaagcttgaagtaacaaattaggggggcagactcacaacctcttgccctgccatggacaagttcaagaatctaagtaaagtcctctattgtctgatcttggatttgctcaacctgaacaagccaaggaggtgtattaaactcaggcacatcctgaccaatttggaattcttaagcttcagatcactgtggaagaggctcaactctttatggtgctgtagacttacgctcattttctaggtaatttataagggacctaatattttgttttcaaagcaacttcagttctactaaacctccctgaagaatcttccagctgctgagtagaaaatcacaactaatttcacagatggtagaacctccttagagcaaaaggacacagcagttaaatgtgacatacctgattgttcaaaatgcaaggctctggacattgcattctttgacttttattttcctttgagcctgtgccagtttctgtccctgctctggtctgacctgccttctgtcccagatctcactaacagccatttccctaggtcatagaagagaacaaagtgcggcagtacgattccatccagaaactgctgaacgagaggagcctcttccggcaagccatcagcccctccgacagggtgaagctctttccccaccggaactcaagcaagtgcaagtctaagccccagattgctgctctgaaagaggagacagaagaagaggtgcaagatacaaggctttagagagcagcataaatgttgacatgggacatttgctcatggaattggagctcgtgggacagtcacctcatggaattggagctcgtggaacagttacctctgcctcagaaaacaaggatgaattaagtttttttttaaaaaagaaacatttggtaaggggaattgaggacactgatatgggtcttgataaatggcttcctggcaatagtcaaattgtgtgaaaggtacttcaaatccttgaagatttaccacttgtgttttgcaagccagattttcctgaaaacccttgccatgtgctagtaattggaaaggcagctctaaatgtcaatcagcctagttgatcagcttattgtctagtgaaactcgttaatttgtagtgttggagaagaactgaaatcatacttcttagggttatgattaagtaatgataactggaaacttcagcggtttatataagcttgtattcctttttctctcctctccccatgatgtttagaaacacaactatattgtttgctaagcattccaactatctcatttccaagcaagtattagaataccacaggaaccacaagactgcacatcaaaatatgccccattcaacatctagtgagcagtcaggaaagagaacttccagatcctggaaatcagggttagtattgtccaggtctaccaaaaatctcaatatttcagataatcacaatacatcccttacctgggaaagggctgttataatctttcacaggggacaggatggttcccttgatgaagaagttgatatgccttttcccaactccagaaagtgacaagctcacagacctttgaactagagtttagctggaaaagtatgttagtgcaaattgtcacaggacagcccttctttccacagaagctccaggtagagggtgtgtaagtagataggccatgggcactgtgggtagacacacatgaagtccaagcatttagatgtataggttgatggtggtatgttttcaggctagatgtatgtacttcatgctgtctacactaagagagaatgagagacacactgaagaagcaccaatcatgaattagttttatatgcttctgttttataattttgtgaagcaaaattttttctctaggaaatatttattttaataatgtttcaaacatatataacaatgctgtattttaaaagaatgattatgaattacatttgtataaaataatttttatatttgaaatattgactttttatggcactagtatttctatgaaatattatgttaaaactgggacaggggagaacctagggtgatattaaccaggggccatgaatcaccttttggtctggagggaagccttggggctgatgcagttgttgcccacagctgtatgattcccagccagcacagcctcttagatgcagttctgaagaagatggtaccaccagtctgactgtttccatcaagggtacactgccttctcaactccaaactgactcttaagaagactgcattatatttattactgtaagaaaatatcacttgtcaataaaatccatacatttgtgtgaaactttgttgttttcagatgcgttcacttgtcatgtttcatcagtctctcactccaatttctaagcttcatggaacatgaaacacgaatctgtcttttagatatagcctcttttgagaattcacatgaattagaacacacatttttagttatctgtttaaactatggtaaaatatacataacataaaattttccattttaaccattttaaagttcagttcagtgtcattaggtacattcacatggttgtgcaaatatcaccatcatccttccacagaatttttttcttgcaaaactgaaactctttttacccgttagtcaataatcccgcatttatctttcctctaatgcctggcaaccaccattttactttctgtctctgattttgactactcgaaggacctaggagtgggatcatacagtatttgtatttttgtgcttatttcatctagcataatgtcttcaagcctcatccatgttgcaacatgggtcaattttcttccttcttaaggttgaataatattcattatagagtagtccccccttatccttggggaatatgttccaagacccccaatggatgcctgaaatcactgatagcactgaacctgattactgtgtttattcctatacatacacacatacatatgataacatttaatttataaattaagcacagtaatagattaacaacaataatcataaaatagaacaattataacaatatattatgacacgagcgatacaaatgtggtctctctctttctcaaaatatctcattatactgtgccacaggtaactgaaaccacagagagcaaaaccttggatagggggaccactctataaatatgtaccacatttttcctcacccattcatccatcactggctacttggtttgcttccactttttggatatagtgaataatgcttctataaatatgggtgtacaaatgtttcttcatgtccctgctttcattacttaggatatgtttgaagttatttttatttttaaatggaggcttatagaacacaaaagatttatattctgcaagtgtccatctatttcttttaaagcttattcaaaaagtggtagctatctcatagctcttggtaagttaaaaatcttcatcaacgaaaatactatttctgcgttggcacctgcatggattttctttgtccaaatccctctttttaattgatgaggcttctttagttcctttttttcttccttgttgagcttcttcatgaaatgtgcagttgctagcatgtggtggacggactgcagatccctactgaatgccaggccctccggccctgtgttctctttcttggagaggtttgttttcacacgtaaccccaagagggcagtctcagagcgtgttctagtctagttctttttttaaaattactaaactttattttttttagggcagttttaggttcccatcaaaattgaacaaaaagtatggagagttcacatataacttctccatacatgatagcctcccccattcaacatcccacactaaagtagtacatttgttacaactgtgaaagcaaatagaatttcaagaccccaagctcactatgccaaagggcaagttaagcttcagagctgaattactcaatattgccttccttttgttccctaacagccgtaacttcacaatcttgtgtgatagcctcatccataaaccaggttcccacaatgatagaaggccacatatctccccaaatgacctccctcacaattgtgcccaaggaaaatccttgtgagaccctatcttttaggatacatatccctcctataaaatagccctaaaactgagttatgttgaatttcaccctgatgatgtcaattaccagcttgtcttcataggcacaggacgcgggcaagaccagaaatcatcgtgctgtctaccctgcaatgaacacataattgacttttcctttactccctctttttacctataaaatttggatttactgaacactaaccaaagcctcccctgaatagaaccatttgcctcactgcctaccctctatcctcttttccttctccgtgtttgcactttactctttaaatattaaagttcccaaaccctctttggaaaagcacaggtcacagatgctcctctggcttgtgttcttcctgggtgcatctgcaaactttggctaaacaaacctctatcgattaagacacctgcctcagtcactttttccttaacacaaccaatgaacctacattgacacattattattgcccaaacacaatagtttatattagggttcattattggtattttacatttcatgggtttggacaaatgtgtaatgacaagttaactaccattacagtatcttacagggtagtttcactgcccaaaaaatactttgtgctctgcatattcattcccctttctcccctaacttttggcaaccactgacctttttattgtctccatagttttgcctttaccagaatgtcatctacttagaattacgcagtatgtggccttttcagattggcttctttcacttagtaatatgcatttaagtttcctccgtatcttttcatggcttgatagctcatttctttttagtgctgaattatattctattgtcagatgtaccacagtttattcattgacctactaaaggacatcttggttgcttcaacgttttggcaattttcaataaagctgctgaaacatctgtgtgtgggtttttgtgtaaatataagttttaatttctttgggtaagtaccaaggagttcaattgttggatcatatagtaaaagatgtttcgttttgtaagaaactgccaaactgtcttcaaagtggctgtaccattttgcagtcccaccagtaacgaatgggagttgtggttgctccttatcattgccagcatttggtgtcctcggcgttttagaatttggccattctaatagttttgtggtggtatctcattgttatttcaatttgcatttccctgatgacatgatgtggagtatgttttcatatgcttatttgccagctgtgtatcttttttggcaaggcatctgttaaggtctttggcccgtgttttgatcaggttgtgtcttgttgttgagttcctttactggatttcttttgttagcatggtataactttatccatccctttattaatctacctggggctttaaatttaactaggtttcttatagacatcatgtaagtcttgctttttgattcactctcacaatctttgttttttagcccttgacatttaaaatgattattgatataattggattaatatctaccatatttattcctgttttctgtttgtttcctttgttctttattcctatttttactttccccatttttttgcctttttaaattttattgagcattttacaggattctattttctcaccttcttaacatagcaattcttctttttttaaacttttttagtggttgccctacagtttgcaataaacatttacaagtgacctatgtgcctttaaataacaatattccatttcatatcagtgcaagtaccttaaattacaaatttctagcttctgtcccttttaccatttcaggtattcatttcatttatatattagcttatatatatccctacacttgatttttcctcatatgagattttctttcctctttcccatttaaaaaaataaaataaactattatagccacagactttctatttttatttgttttctgtattgaagtcttgattttggggctttacttgtccctgtctatgcccactcctatctgacacacactttcttaatttatttcctagttgtttcactttgtttatcttcattatgaggaaaaaaagccaaaacctgaaatgaatatgcttccttccagtaaccagggaccttccatggttgggaaattgttacctattcgagtgaaaggctaataaaacccccaaggtaaatattttagtacttcactaaagaaagaacctcaaatactatgtggaagacaatttaaaatgaggtttaaagagctcaatataaaaacctgtttgacctgttaaaacaggtgtggacaatcacaattccctatttaaaaatacagtgaaaaaacctacaaatgcaagacaaatacattggagcatgagaactccaaattgttaggttaggaattagaagctgttcccagtgtgtagagctaagagacccaagtcattgtcagttgacagggagccgggactcaatacctgtgtactttctcagagaaaggagaggtcttggcaaaattttgggtttatccttaattccatacaatgggaatattcaattgctctttaatcactcagtattgatagggacagggggcagagaaattctaggcagaaaagggcgggaccctggtgaaaccccaccctcaatccgaaaaacctgaaactgccaccgaaagtgagaacttctatccctgttttcccactcgaatgttgcctttttctaaactacccgtggcctgctccacccccatcctttgcctataaaaaccccagactcagttggtagatgggactataactggacattggagagaagtggcttgacttcagagcgacagcttgacagcatactttggagaagaatctgagaggagaaggcaagacttcaggggaagattacctatctgccctgtcccctgttcagctctatttcccactgaaagccactttcatcagcaataaaatccctcatttaccatccttcaattcgttcatgtgacctcattttttctggacgccagacaagagcttggaggccacgagtatggatacaaaaggctgtcacactggctgtttgcccttgctggtggagggcagctgcctcacatgaaaaggcaaagagctcactgagctgttaacacttaagccttccgcagacggcagagctgaaagagcactgcaacacaccctctgggcctcaggctctcaggcactcctacctggttgcgccgctgggcccgcacagagtttgctactgccggcacctgaaagcggttggctggttcctgcactcgctcgttctggttcctgcacttattcattcgcacgctccctcccacaaggggtagacggggcgggatgggtaaatgaggcacccctgtctcaagtcccgtgaaggcgtcagggaaataatctgcttcagtttctctagttgtaaaatggttaagaacattatgaaaggtggtcaacaactttataagtgaatatgctaatgctggccttaattctaaaatgctacttggatcaaaagttatgattcagttccaatacatcttctattcattgaagtacagaatctgtacacaaagtacaattgtatcttcaaaaactgccaccttgtggagatttggttttattgttaagacagccagtgccaacaacagaaatgagtacagagcctcacatactaatgtaagtgaatctcaaagacattttatctttaagccattttgaaaagtagaaattaagcctgaatagttttggggcacaaattgctctttaactctcttctttcccattcacctttgtcactgatggaataatagaaggagcaatctttatcagcaatggcagatgtgctgataaatgaaaccaaaactgaattgacaaatattgacacaaatacttatagaagcaatttaaaaatctaccttgcaattaatccttatgaaatttaagtcataatttactaaaaattataatataaagaaataaactttctctgttttattaaaagaaaggatcaatacatttggccacaattgattggccataatttttgtcaatgttctataagctaattgaaaataagactattttaaatataattatctcccttctcctttgccttttcattggcagcaggtgccatgggcttattcatattctaaaagagaagttgtgtgagcaaatttgtcatcataggcaatcctcttgtaaggaaaaaattatgatttgatttttattttctcttatctcctaattgggtcagatactccagtgtcctcggggagccaaaccaggagccagtgtgtccttacacaaacacagcttccttcctgcttggagctcacaccaagcatttgcatttgaaccaagcaatgttgacaggctattgagccacagaagttaaacattccaagtgagcctgagacgaccattacattcttttacattttctggtcgattaaaattttaattgtttaaaatttcaaatagatacaaaaatagacatagagtataataaacttcacacccctgtcactgaacttcaatagttatcagctcacagtcaatcttatttcatctatgctccctcatgcttccctcctatattattttgtgcaaatccaaacagcatataactttagctctatgtgtctctaaaagacacggctttctctatcattctttttcttttgaaactgatccatattacctttaccagaactagaaaaacagtcatctttaatatcctcaaatattcactccatgtataaacgtcattgtcagttttttcccaaatataggtagtcctcatgttgcacattaatatggcactatgaaaatcaccatgcaagataatttaaataattaatgggggaaaaattgttccatgacctttaaaaatattaaaaatttaaaactttcttactgttggttataaacaatagggacacaaaaatagtgaaacatttagtaagtaatttaaaacattagaaacactgagaattaaaatgtttcttttaaactacttatcaagagtagtttgagcaatacttggtttcttttggttatgtaacttgcaatatgaagaaagcatcttttctatgcctgggcaagttgtcatactcctttctaatttaggaccagcttccaacattgtatccttcgtgacttcaatgttgtaaaatatctccaagagtttgtttaaggtaatgatttttgctgatgtcacctcctctggggcatctgacaggcattcctgctaggtcaacctatagcagagggtggaagggcccagagatggcaagagagaaaaggggggaaccttttagaggtgattaggctatgagggctctgctttcatgaatggattaatgccattacggcagtgagttcattataaaaggacaagtttggcccccttctctctctttcttgctctcttttggcccttttgccttctgccatgggatgacacagcacaaaaaccctcaccagatgctgaccccttgatactggacttcccagcctccagaactgtaagccaacaaatgtgtgttctttataaattaccccagctgtggcattctgttatagcagtacaaaatagatcaagacaaagggggattgcaggcaggaagggagcccctgacctcttagtttcactcatctggaatttagccactacaacacagagctggggcttgaggggataagaaatgctattgacctgcacttcccagggtgatagtacagttacaggctgtaaactcaagggagagggaatgccatcatcttggccacatcagcctggagtagagcttctatcacaccaagttgggggagggaagagggagcagcttgtgactgaagtgccataaacttttgttcttactgagattagtatattttctggaataaacgctgctgcttttgctgtatgtgcttagggccattttcagagactttaaatgattgataattgttaccagtaatggttattttgatgggtagttggtccacagagctcctcaccttgctgttctagaaattgtcttttagcttagtattaattcctgaatttttcagtttttctgatcttttacctccaggatgactctttgaaacaactctaaattattgactgaaacttttatgtataattctcattttgttcttcacacaatctctgtgaaggaggttctaagaactaagaggcttagagagggtaaggatcttcccagaaattacacagcactcccagatttggaacctttagaaagtttatatacttattggaaaacttagctcatttttaatcagagggaagtcattttacagtgccccatacagggagtcagataactacttcctagttaggttttcctctctatagagagtcaaccagccctgctgtactttcccgtgggatctgaaactgcagaaatctactgagaaaaacagaatgctcacagcaggataaagctcatgttttctagagctactaagattcaggcttatgcctctgtgtttgattttttaatagtcttgctaatgtcaaagtgattctatcttacacaccccaaagtctgtaaaggtataataacaaggggtgagattgtcttaaatctgcagtttcttgatctgtttagtgggctactataggttactgcaggacctctcaaggtttctagtatgcaaaggtgcattttgactctgtaagagtggaatatcatatgtaatgtttctcaattgatttgtctacataaccgtattttcttgtgccatttatatcctgtgttttggggaaggttggcctagaacatttattctaaaaggaaagggcatgggaaattcttaccattggcagtgtcggggaggaaaaaatgcatacttcttacccatttagtttattttgctagtttacaaattaaattgagataagacagattaataggagaaaatcaactttaattatgtgtgtatacatgggagtcccacaaaaatgtaagactcaaggaagcagccagatgattgagacctatatattatcctgagctacagaaagggataagggtttggggcttttgcggggttgtggaggcaaattttgggaaggcgaggagaggaaatgtatgatcaataaacgttgccttgttgtgcagataaaagtgtcttaggtgataaagatgtttccaaagagtagttctcttcatggtacagatattttactcatgatcatttcctttatagatataaatttcctttacgaaagggggaattttattttatgtagttagtggagaagtcggtaaagagcttttcctgtattggctgattctcagttttttttagctcaaaatgatcaatatgccgaagtggcatgttctgaaatgacatattctgaatcctttcagctggaatatatttgtatatcaacagtgtttccatctgtcagcccttagggtctgcttatggaagatataagcacctggatgaccatgacgaaaatctggagattttgagaaaacactggtgcaaggctccatccaaaatcaattaaagaagaatcttggaagatggggttaggtcactgatagcttgaaaggcatcccaggtgattctaatacgcagccagttgagaagcacggatttttttattgggtttttcaggctggctgaaagaactgcgatgctcaggaaaccaggggtgcctggcaggagtttgaccggggagactgaagcctgtcaacagggacaagaacggtaggctggtgcctggcacctgagggtacttcagaggtgctcattaaaaaagaggaggggacatcaagcgagaattcttaatcagacattcaacaaattgagggtcgtctatgtgttctaggtgctaagaactcggcagcaaacaaggcaaagttctcagtgtcatggagtttacattctagtggatgaggacaaaagtaagtaaatgttaaaaatatatagcagatggtaactaaagagacaaagcagagaattaggttatttgctgtaacatcatcaaaaagtcattagtatggtggcaattgagcagaaacatgaaggaagtgaggaagtcagctgtgtgggtgtcttgaacagtgtttgaagcaaagggaagagcaaatgtaaaggcagaatcatggctgggatgttggaggagcagcaaggaagtgctgtgaatcttggggaaaaagaggtt

SEQ ID NO: 986 - DNA, 5974 bp, Homo sapiens
aattggaagcaaatgacatcacagcaggtcagagaaaaagggttgagcggcaggcacccagagtagtaggtctttggcattaggagcttgagcccagacggccctagcagggaccccagcgcccgagagaccatgcagaggtcgcctctggaaaaggccagcgttgtctccaaactttttttcagctggaccagaccaattttgaggaaaggatacagacagcgcctggaattgtcagacatataccaaatcccttctgttgattctgctgacaatctatctgaaaaattggaaagagaatgggatagagagctggcttcaaagaaaaatcctaaactcattaatgcccttcggcgatgttttttctggagatttatgttctatggaatctttttatatttaggggaagtcaccaaagcagtacagcctctcttactgggaagaatcatagcttcctatgacccggataacaaggaggaacgctctatcgcgatttatctaggcataggcttatgccttctctttattgtgaggacactgctcctacacccagccatttttggccttcatcacattggaatgcagatgagaatagctatgtttagtttgatttataagaagactttaaagctgtcaagccgtgttctagataaaataagtattggacaacttgttagtctcctttccaacaacctgaacaaatttgatgaaggacttgcattggcacatttcgtgtggatcgctcctttgcaagtggcactcctcatggggctaatctgggagttgttacaggcgtctgccttctgtggacttggtttcctgatagtccttgccctttttcaggctgggctagggagaatgatgatgaagtacagagatcagagagctgggaagatcagtgaaagacttgtgattacctcagaaatgattgaaaatatccaatctgttaaggcatactgctgggaagaagcaatggaaaaaatgattgaaaacttaagacaaacagaactgaaactgactcggaaggcagcctatgtgagatacttcaatagctcagccttcttcttctcagggttctttgtggtgtttttatctgtgcttccctatgcactaatcaaaggaatcatcctccggaaaatattcaccaccatctcattctgcattgttctgcgcatggcggtcactcggcaatttccctgggctgtacaaacatggtatgactctcttggagcaataaacaaaatacaggatttcttacaaaagcaagaatataagacattggaatataacttaacgactacagaagtagtgatggagaatgtaacagccttctgggaggagggatttggggaattatttgagaaagcaaaacaaaacaataacaatagaaaaacttctaatggtgatgacagcctcttcttcagtaatttctcacttcttggtactcctgtcctgaaagatattaatttcaagatagaaagaggacagttgttggcggttgctggatccactggagcaggcaagacttcacttctaatggtgattatgggagaactggagccttcagagggtaaaattaagcacagtggaagaatttcattctgttctcagttttcctggattatgcctggcaccattaaagaaaatatcatctttggtgtttcctatgatgaatatagatacagaagcgtcatcaaagcatgccaactagaagaggacatctccaagtttgcagagaaagacaatatagttcttggagaaggtggaatcacactgagtggaggtcaacgagcaagaatttctttagcaagagcagtatacaaagatgctgatttgtatttattagactctccttttggatacctagatgttttaacagaaaaagaaatatttgaaagctgtgtctgtaaactgatggctaacaaaactaggattttggtcacttctaaaatggaacatttaaagaaagctgacaaaatattaattttgcatgaaggtagcagctatttttatgggacattttcagaactccaaaatctacagccagactttagctcaaaactcatgggatgtgattctttcgaccaatttagtgcagaaagaagaaattcaatcctaactgagaccttacaccgtttctcattagaaggagatgctcctgtctcctggacagaaacaaaaaaacaatcttttaaacagactggagagtttggggaaaaaaggaagaattctattctcaatccaatcaactctatacgaaaattttccattgtgcaaaagactcccttacaaatgaatggcatcgaagaggattctgatgagcctttagagagaaggctgtccttagtaccagattctgagcagggagaggcgatactgcctcgcatcagcgtgatcagcactggccccacgcttcaggcacgaaggaggcagtctgtcctgaacctgatgacacactcagttaaccaaggtcagaacattcaccgaaagacaacagcatccacacgaaaagtgtcactggcccctcaggcaaacttgactgaactggatatatattcaagaaggttatctcaagaaactggcttggaaataagtgaagaaattaacgaagaagacttaaaggagtgcttttttgatgatatggagagcataccagcagtgactacatggaacacataccttcgatatattactgtccacaagagcttaatttttgtgctaatttggtgcttagtaatttttctggcagaggtggctgcttctttggttgtgctgtggctccttggaaacactcctcttcaagacaaagggaatagtactcatagtagaaataacagctatgcagtgattatcaccagcaccagttcgtattatgtgttttacatttacgtgggagtagccgacactttgcttgctatgggattcttcagaggtctaccactggtgcatactctaatcacagtgtcgaaaattttacaccacaaaatgttacattctgttcttcaagcacctatgtcaaccctcaacacgttgaaagcaggtgggattcttaatagattctccaaagatatagcaattttggatgaccttctgcctcttaccatatttgacttcatccagttgttattaattgtgattggagctatagcagttgtcgcagttttacaaccctacatctttgttgcaacagtgccagtgatagtggcttttattatgttgagagcatatttcctccaaacctcacagcaactcaaacaactggaatctgaaggcaggagtccaattttcactcatcttgttacaagcttaaaaggactatggacacttcgtgccttcggacggcagccttactttgaaactctgttccacaaagctctgaatttacatactgccaactggttcttgtacctgtcaacactgcgctggttccaaatgagaatagaaatgatttttgtcatcttcttcattgctgttaccttcatttccattttaacaacaggagaaggagaaggaagagttggtattatcctgactttagccatgaatatcatgagtacattgcagtgggctgtaaactccagcatagatgtggatagcttgatgcgatctgtgagccgagtctttaagttcattgacatgccaacagaaggtaaacctaccaagtcaaccaaaccatacaagaatggccaactctcgaaagttatgattattgagaattcacacgtgaagaaagatgacatctggccctcagggggccaaatgactgtcaaagatctcacagcaaaatacacagaaggtggaaatgccatattagagaacatttccttctcaataagtcctggccagagggtgggcctcttgggaagaactggatcagggaagagtactttgttatcagcttttttgagactactgaacactgaaggagaaatccagatcgatggtgtgtcttgggattcaataactttgcaacagtggaggaaagcctttggagtgataccacagaaagtatttattttttctggaacatttagaaaaaacttggatccctatgaacagtggagtgatcaagaaatatggaaagttgcagatgaggttgggctcagatctgtgatagaacagtttcctgggaagcttgactttgtccttgtggatgggggctgtgtcctaagccatggccacaagcagttgatgtgcttggctagatctgttctcagtaaggcgaagatcttgctgcttgatgaacccagtgctcatttggatccagtaacataccaaataattagaagaactctaaaacaagcatttgctgattgcacagtaattctctgtgaacacaggatagaagcaatgctggaatgccaacaatttttggtcatagaagagaacaaagtgcggcagtacgattccatccagaaactgctgaacgagaggagcctcttccggcaagccatcagcccctccgacagggtgaagctctttccccaccggaactcaagcaagtgcaagtctaagccccagattgctgctctgaaagaggagacagaagaagaggtgcaagatacaaggctttagagagcagcataaatgttgacatgggacatttgctcatggaattggagctcgtgggacagtcacctcatggaattggagctcgtggaacagttacctctgcctcagaaaacaaggatgaattaagtttttttttaaaaaagaaacatttggtaaggggaattgaggacactgatatgggtcttgataaatggcttcctggcaatagtcaaattgtgtgaaaggtacttcaaatccttgaagatttaccacttgtgttttgttaagtaatgataactggaaacttcagcggtttatataagcttgtattcctttttctctcctctccccatgatgtttagaaacacaactatattgtttgctaagcattccaactatctcatttccaagcaagtattagaataccacaggaaccacaagactgcacatcaaaatatgccccattcaacatctagtgagcagtcaggaaagagaacttccagatcctggaaatcagggttagtattgtccaggtctaccaaaaatctcaatatttcagataatcacaatacatcccttacctgggaaagggctgttataatctttcacaggggacaggatggttcccttgatgaagaagttgatatgccttttcccaactccagaaagtgacaagctcacagacctttgaactagagtttagctggaaaagtatgttagtgcaaattgtcacaggacagcccttctttccacagaagctccaggtagagggtgtgtaagtagataggccatgggcactgtgggtagacacacatgaagtccaagcatttagatgtataggttgatggtggtatgttttcaggctagatgtatgtacttcatgctgtctacactaagagagaatgagagacacactgaagaagcaccaatcatgaattagttttatatgcttctgttttataattttgtgaagcaaaattttttctctaggaaatatttattttaataatgtttcaaacatatataacaatgctgtattttaaaagaatgattatgaattacatttgtataaaataatttttatatttgaaatattgactttttatggcactagtatttctatgaaatattatgttaaaactgggacaggggagaacctagggtgatattaaccaggggccatgaatcaccttttggtctggagggaagccttggggctgatgcagttgttgcccacagctgtatgattcccagccagcacagcctcttagatgcagttctgaagaagatggtaccaccagtctgactgtttccatcaagggtacactgccttctcaactccaaactgactcttaagaagactgcattatatttattactgtaagaaaatatcacttgtcaataaaatccatacatttgtgtg

SEQ ID NO: 987 - protein, 1470 aa, Homo sapiens
MQRSPLEKASVVSKLFFSWWILRKGYRQRLELSDIYQIPSVDSADNLSEKLEREWDRELASKKNPKLINALRRCFFWRFMFYGIFLYLGEVTKAVQPLLLGRIIASYDPDNKEERSIAIYLGIGLCLLFIVRTLLLHPAIFGLHHIGMQMRIAMFSLIYKKTLKLSSRVLDKISIGQLVSLLSNNLNKFDEGLAHFVWIAPLQVLMGLIWELLQASAFCGLGFLIVLALFQAGLGRMMMKYRDQRAGKISLVITSEMIENIQSVKAYCWEEAMEKMIENLRQTELKLTRKAAYVRYFNSSAFFFSGFFVVFLSVLPYALIKGIILRKIFTTISFCIVLRMAVTRQFPWAVQTWYDSLGAINKIQDFLQKQEYKTLEYNLTTTEVVMENVTAFWEEGFGELFEKAKQNNNNRKTSNGDDSLFFSNFSLLGTPVLKDINFKIERGQLLAVAGSTGAGKTSLLMVIMGELEPSEGKIKHSGRISFCSQFSWIMPGTIKENIIFGVSYDEYRYRSVIKACQLEEDISKFAEKDNIVLGEGGITLSGGQRARISLARAVYKDADLYLLDSPFGYLDVLTEKEIFESCVCKLMANKTRILVTSKMEHLKKADKILILHEGSSYFYGTFSELQNLQPDFSSKLMGCDSFDQFSAERRNSILTETLHRFSLEGDAPVSWTETKKQSFKQTGEFGEKRKNSILNPINSIRKFSIVQKTPLQMNGIEEDSDEPLERRLSLVPDSEQGEAILPRISVISTGPTLQARRRQSVLNLMTHSVNQGQNIHRKTTASTRKVSLAPQANLTELDIYSRRLSQETGLEISEEINEEDLKECFFDDMESIPAVTTWNTYLRYITVHKSLIFVLIWCLVIFLAEVAASLVVLWLLGNTPLQDKGNSTHSRNNSYAVIITSTSSYYVFYIYVGVADTLLAMGFFRGLPLVHTLITVSKILHHKMLHSVLQAPMSTLNTLKAGGILNRFSKDIAILDDLLPLTIFDFIQLLLIVIGAIAVVAVLQPYIFVATVPVIVAFIMLRAYFLQTSQQLKQLESEGRSPIFTHLVTSLKGLWTLRAFGRQPYFETLFHKALNLHTANWFLYLSTLRWFQMRIEMIFVIFFIAVTFISILTTGEGEGRVGIILTLAMNIMSTLQWAVNSSIDVDSLMRSVSRVFKFIDMPTEGKPTKSTKPYKNGQLSKVMIIENSHVKKDDIWPSGGQMTVKDLTAKYTEGGNAINISFSISPGQRVGLLGRTGSGKSTLLSAFLRLLNTEGEIQIDGVSWDSITLQQWRKAFGVIPQKVFIFSGTFRKNLDPYEQWSDQEIWKVADEVGLRSVIEQFPGKLDFVLVDGGCVLSHGHKQLMCLARSVLSKAKILLLDEPSAHLDPVTYQIIRRTLKQAFADCTVILCEHRIEAMLECQQFLVIEENKVRQYDSIQKLLNERSLFRQAISPSDRVKLFPHRNSSKCKSKPQIAALKEETEEEVQDTRL

SEQ ID NO: 988 - DNA, 4143 bp, Homo sapiens
aattggaagcaaatgacatcacagcaggtcagagaaaaagggttgagcggcaggcacccagagtagtaggtctttggcattaggagcttgagcccagacggccctagcagggaccccagcgcccgagagaccatgcagaggtcgcctctggaaaaggccagcgttgtctccaaactttttttcagctggaccagaccaattttgaggaaaggatacagacagcgcctggaattgtcagacatataccaaatcccttctgttgattctgctgacaatctatctgaaaaattggaaagagaatgggatagagagctggcttcaaagaaaaatcctaaactcattaatgcccttcggcgatgttttttctggagatttatgttctatggaatctttttatatttaggggaagtcaccaaagcagtacagcctctcttactgggaagaatcatagcttcctatgacccggataacaaggaggaacgctctatcgcgatttatctaggcataggcttatgccttctctttattgtgaggacactgctcctacacccagccatttttggccttcatcacattggaatgcagatgagaatagctatgtttagtttgatttataagaagactttaaagctgtcaagccgtgttctagataaaataagtattggacaacttgttagtctcctttccaacaacctgaacaaatttgatgaaggacttgcattggcacatttcgtgtggatcgctcctttgcaagtggcactcctcatggggctaatctgggagttgttacaggcgtctgccttctgtggacttggtttcctgatagtccttgccctttttcaggctgggctagggagaatgatgatgaagtacagagatcagagagctgggaagatcagtgaaagacttgtgattacctcagaaatgattgaaaatatccaatctgttaaggcatactgctgggaagaagcaatggaaaaaatgattgaaaacttaagacaaacagaactgaaactgactcggaaggcagcctatgtgagatacttcaatagctcagccttcttcttctcagggttctttgtggtgtttttatctgtgcttccctatgcactaatcaaaggaatcatcctccggaaaatattcaccaccatctcattctgcattgttctgcgcatggcggtcactcggcaatttccctgggctgtacaaacatggtatgactctcttggagcaataaacaaaatacaggatttcttacaaaagcaagaatataagacattggaatataacttaacgactacagaagtagtgatggagaatgtaacagccttctgggaggagggatttggggaattatttgagaaagcaaaacaaaacaataacaatagaaaaacttctaatggtgatgacagcctcttcttcagtaatttctcacttcttggtactcctgtcctgaaagatattaatttcaagatagaaagaggacagttgttggcggttgctggatccactggagcaggcaagacttcacttctaatggtgattatgggagaactggagccttcagagggtaaaattaagcacagtggaagaatttcattctgttctcagttttcctggattatgcctggcaccattaaagaaaatatcatctttggtgtttcctatgatgaatatagatacagaagcgtcatcaaagcatgccaactagaagaggacatctccaagtttgcagagaaagacaatatagttcttggagaaggtggaatcacactgagtggaggtcaacgagcaagaatttctttagcaagagcagtatacaaagatgctgatttgtatttattagactctccttttggatacctagatgttttaacagaaaaagaaatatttgaaagctgtgtctgtaaactgatggctaacaaaactaggattttggtcacttctaaaatggaacatttaaagaaagctgacaaaatattaattttgcatgaaggtagcagctatttttatgggacattttcagaactccaaaatctacagccagactttagctcaaaactcatgggatgtgattctttcgaccaatttagtgcagaaagaagaaattcaatcctaactgagaccttacaccgtttctcattagaaggagatgctcctgtctcctggacagaaacaaaaaaacaatcttttaaacagactggagagtttggggaaaaaaggaagaattctattctcaatccaatcaactctatacgaaaattttccattgtgcaaaagactcccttacaaatgaatggcatcgaagaggattctgatgagcctttagagagaaggctgtccttagtaccagattctgagcagggagaggcgatactgcctcgcatcagcgtgatcagcactggccccacgcttcaggcacgaaggaggcagtctgtcctgaacctgatgacacactcagttaaccaaggtcagaacattcaccgaaagacaacagcatccacacgaaaagtgtcactggcccctcaggcaaacttgactgaactggatatatattcaagaaggttatctcaagaaactggcttggaaataagtgaagaaattaacgaagaagacttaaaggagtgcttttttgatgatatggagagcataccagcagtgactacatggaacacataccttcgatatattactgtccacaagagcttaatttttgtgctaatttggtgcttagtaatttttctggcagaggtggctgcttctttggttgtgctgtggctccttggaaacactcctcttcaagacaaagggaatagtactcatagtagaaataacagctatgcagtgattatcaccagcaccagttcgtattatgtgttttacatttacgtgggagtagccgacactttgcttgctatgggattcttcagaggtctaccactggtgcatactctaatcacagtgtcgaaaattttacaccacaaaatgttacattctgttcttcaagcacctatgtcaaccctcaacacgttgaaagcaggtgggattcttaatagattctccaaagatatagcaattttggatgaccttctgcctcttaccatatttgacttcatccagttgttattaattgtgattggagctatagcagttgtcgcagttttacaaccctacatctttgttgcaacagtgccagtgatagtggcttttattatgttgagagcatatttcctccaaacctcacagcaactcaaacaactggaatctgaaggcaggagtccaattttcactcatcttgttacaagcttaaaaggactatggacacttcgtgccttcggacggcagccttactttgaaactctgttccacaaagctctgaatttacatactgccaactggttcttgtacctgtcaacactgcgctggttccaaatgagaatagaaatgatttttgtcatcttcttcattgctgttaccttcatttccattttaacaacaggagaaggagaaggaagagttggtattatcctgactttagccatgaatatcatgagtacattgcagtgggctgtaaactccagcatagatgtggatagcttgatgcgatctgtgagccgagtctttaagttcattgacatgccaacagaaggtaaacctaccaagtcaaccaaaccatacaagaatggccaactctcgaaagttatgattattgagaattcacacgtgaagaaagatgacatctggccctcagggggccaaatgactgtcaaagatctcacagcaaaatacacagaaggtggaaatgccatattagagaacatttccttctcaataagtcctggccagagggtgagatttgaacactgcttgctttgttagactgtgttcagtaagtgaatcccagtagcctgaagcaatgtgttagcagaatctatttgtaacattattattgtacagtagaatcaatattaaacacacatgttttattatatggagtcattatttttaatatgaaatttaatttgcagagtcctgaacctatataatgggtttattttaaatgtgattgtacttgcagaatatctaattaattgctaggttaataactaaagaagccattaaataaatcaaaattgtaacatg

SEQ ID NO: 989 - protein, 1238 aa, Homo sapiens
MQRSPLEKASVVSKLFFSWWILRKGYRQRLELSDIYQIPSVDSADNLSEKLEREWDRELASKKNPKLINALRRCFFWRFMFYGIFLYLGEVTKAVQPLLLGRIIASYDPDNKEERSIAIYLGIGLCLLFIVRTLLLHPAIFGLHHIGMQMRIAMFSLIYKKTLKLSSRVLDKISIGQLVSLLSNNLNKFDEGLAHFVWIAPLQVLMGLIWELLQASAFCGLGFLIVLALFQAGLGRMMMKYRDQRAGKISLVITSEMIENIQSVKAYCWEEAMEKMIENLRQTELKLTRKAAYVRYFNSSAFFFSGFFVVFLSVLPYALIKGIILRKIFTTISFCIVLRMAVTRQFPWAVQTWYDSLGAINKIQDFLQKQEYKTLEYNLTTTEVVMENVTAFWEEGFGELFEKAKQNNNNRKTSNGDDSLFFSNFSLLGTPVLKDINFKIERGQLLAVAGSTGAGKTSLLMVIMGELEPSEGKIKHSGRISFCSQFSWIMPGTIKENIIFGVSYDEYRYRSVIKACQLEEDISKFAEKDNIVLGEGGITLSGGQRARISLARAVYKDADLYLLDSPFGYLDVLTEKEIFESCVCKLMANKTRILVTSKMEHLKKADKILILHEGSSYFYGTFSELQNLQPDFSSKLMGCDSFDQFSAERRNSILTETLHRFSLEGDAPVSWTETKKQSFKQTGEFGEKRKNSILNPINSIRKFSIVQKTPLQMNGIEEDSDEPLERRLSLVPDSEQGEAILPRISVISTGPTLQARRRQSVLNLMTHSVNQGQNIHRKTTASTRKVSLAPQANLTELDIYSRRLSQETGLEISEEINEEDLKECFFDDMESIPAVTTWNTYLRYITVHKSLIFVLIWCLVIFLAEVAASLVVLWLLGNTPLQDKGNSTHSRNNSYAVIITSTSSYYVFYIYVGVADTLLAMGFFRGLPLVHTLITVSKILHHKMLHSVLQAPMSTLNTLKAGGILNRFSKDIAILDDLLPLTIFDFIQLLLIVIGAIAVVAVLQPYIFVATVPVIVAFIMLRAYFLQTSQQLKQLESEGRSPIFTHLVTSLKGLWTLRAFGRQPYFETLFHKALNLHTANWFLYLSTLRWFQMRIEMIFVIFFIAVTFISILTTGEGEGRVGIILTLAMNIMSTLQWAVNSSIDVDSLMRSVSRVFKFIDMPTEGKPTKSTKPYKNGQLSKVMIIENSHVKKDDIWPSGGQMTVKDLTAKYTEGGNAINISFSISPGQRVRFEHCLLC

SEQ ID NO: 990 - DNA, 6132 bp, Homo sapiens
aattggaagcaaatgacatcacagcaggtcagagaaaaagggttgagcggcaggcacccagagtagtaggtctttggcattaggagcttgagcccagacggccctagcagggaccccagcgcccgagagaccatgcagaggtcgcctctggaaaaggccagcgttgtctccaaactttttttcagctggaccagaccaattttgaggaaaggatacagacagcgcctggaattgtcagacatataccaaatcccttctgttgattctgctgacaatctatctgaaaaattggaaagagaatgggatagagagctggcttcaaagaaaaatcctaaactcattaatgcccttcggcgatgttttttctggagatttatgttctatggaatctttttatatttaggggaagtcaccaaagcagtacagcctctcttactgggaagaatcatagcttcctatgacccggataacaaggaggaacgctctatcgcgatttatctaggcataggcttatgccttctctttattgtgaggacactgctcctacacccagccatttttggccttcatcacattggaatgcagatgagaatagctatgtttagtttgatttataagaagactttaaagctgtcaagccgtgttctagataaaataagtattggacaacttgttagtctcctttccaacaacctgaacaaatttgatgaaggacttgcattggcacatttcgtgtggatcgctcctttgcaagtggcactcctcatggggctaatctgggagttgttacaggcgtctgccttctgtggacttggtttcctgatagtccttgccctttttcaggctgggctagggagaatgatgatgaagtacagagatcagagagctgggaagatcagtgaaagacttgtgattacctcagaaatgattgaaaatatccaatctgttaaggcatactgctgggaagaagcaatggaaaaaatgattgaaaacttaagacaaacagaactgaaactgactcggaaggcagcctatgtgagatacttcaatagctcagccttcttcttctcagggttctttgtggtgtttttatctgtgcttccctatgcactaatcaaaggaatcatcctccggaaaatattcaccaccatctcattctgcattgttctgcgcatggcggtcactcggcaatttccctgggctgtacaaacatggtatgactctcttggagcaataaacaaaatacaggatttcttacaaaagcaagaatataagacattggaatataacttaacgactacagaagtagtgatggagaatgtaacagccttctgggaggagggatttggggaattatttgagaaagcaaaacaaaacaataacaatagaaaaacttctaatggtgatgacagcctcttcttcagtaatttctcacttcttggtactcctgtcctgaaagatattaatttcaagatagaaagaggacagttgttggcggttgctggatccactggagcaggcaagacttcacttctaatggtgattatgggagaactggagccttcagagggtaaaattaagcacagtggaagaatttcattctgttctcagttttcctggattatgcctggcaccattaaagaaaatatcatctttggtgtttcctatgatgaatatagatacagaagcgtcatcaaagcatgccaactagaagaggacatctccaagtttgcagagaaagacaatatagttcttggagaaggtggaatcacactgagtggaggtcaacgagcaagaatttctttagcaagagcagtatacaaagatgctgatttgtatttattagactctccttttggatacctagatgttttaacagaaaaagaaatatttgaaagctgtgtctgtaaactgatggctaacaaaactaggattttggtcacttctaaaatggaacatttaaagaaagctgacaaaatattaattttgcatgaaggtagcagctatttttatgggacattttcagaactccaaaatctacagccagactttagctcaaaactcatgggatgtgattctttcgaccaatttagtgcagaaagaagaaattcaatcctaactgagaccttacaccgtttctcattagaaggagatgctcctgtctcctggacagaaacaaaaaaacaatcttttaaacagactggagagtttggggaaaaaaggaagaattctattctcaatccaatcaactctatacgaaaattttccattgtgcaaaagactcccttacaaatgaatggcatcgaagaggattctgatgagcctttagagagaaggctgtccttagtaccagattctgagcagggagaggcgatactgcctcgcatcagcgtgatcagcactggccccacgcttcaggcacgaaggaggcagtctgtcctgaacctgatgacacactcagttaaccaaggtcagaacattcaccgaaagacaacagcatccacacgaaaagtgtcactggcccctcaggcaaacttgactgaactggatatatattcaagaaggttatctcaagaaactggcttggaaataagtgaagaaattaacgaagaagacttaaaggagtgcttttttgatgatatggagagcataccagcagtgactacatggaacacataccttcgatatattactgtccacaagagcttaatttttgtgctaatttggtgcttagtaatttttctggcagaggtggctgcttctttggttgtgctgtggctccttggaaacactcctcttcaagacaaagggaatagtactcatagtagaaataacagctatgcagtgattatcaccagcaccagttcgtattatgtgttttacatttacgtgggagtagccgacactttgcttgctatgggattcttcagaggtctaccactggtgcatactctaatcacagtgtcgaaaattttacaccacaaaatgttacattctgttcttcaagcacctatgtcaaccctcaacacgttgaaagcaggtgggattcttaatagattctccaaagatatagcaattttggatgaccttctgcctcttaccatatttgacttcatccagttgttattaattgtgattggagctatagcagttgtcgcagttttacaaccctacatctttgttgcaacagtgccagtgatagtggcttttattatgttgagagcatatttcctccaaacctcacagcaactcaaacaactggaatctgaaggcaggagtccaattttcactcatcttgttacaagcttaaaaggactatggacacttcgtgccttcggacggcagccttactttgaaactctgttccacaaagctctgaatttacatactgccaactggttcttgtacctgtcaacactgcgctggttccaaatgagaatagaaatgatttttgtcatcttcttcattgctgttaccttcatttccattttaacaacaggagaaggagaaggaagagttggtattatcctgactttagccatgaatatcatgagtacattgcagtgggctgtaaactccagcatagatgtggatagcttgatgcgatctgtgagccgagtctttaagttcattgacatgccaacagaaggtaaacctaccaagtcaaccaaaccatacaagaatggccaactctcgaaagttatgattattgagaattcacacgtgaagaaagatgacatctggccctcagggggccaaatgactgtcaaagatctcacagcaaaatacacagaaggtggaaatgccatattagagaacatttccttctcaataagtcctggccagagggtgggcctcttgggaagaactggatcagggaagagtactttgttatcagcttttttgagactactgaacactgaaggagaaatccagatcgatggtgtgtcttgggattcaataactttgcaacagtggaggaaagcctttggagtgataccacagaaagtatttattttttctggaacatttagaaaaaacttggatccctatgaacagtggagtgatcaagaaatatggaaagttgcagatgaggttgggctcagatctgtgatagaacagtttcctgggaagcttgactttgtccttgtggatgggggctgtgtcctaagccatggccacaagcagttgatgtgcttggctagatctgttctcagtaaggcgaagatcttgctgcttgatgaacccagtgctcatttggatccagtaacataccaaataattagaagaactctaaaacaagcatttgctgattgcacagtaattctctgtgaacacaggatagaagcaatgctggaatgccaacaatttttggtcatagaagagaacaaagtgcggcagtacgattccatccagaaactgctgaacgagaggagcctcttccggcaagccatcagcccctccgacagggtgaagctctttccccaccggaactcaagcaagtgcaagtctaagccccagattgctgctctgaaagaggagacagaagaagaggtgcaagatacaaggctttagagagcagcataaatgttgacatgggacatttgctcatggaattggagctcgtgggacagtcacctcatggaattggagctcgtggaacagttacctctgcctcagaaaacaaggatgaattaagtttttttttaaaaaagaaacatttggtaaggggaattgaggacactgatatgggtcttgataaatggcttcctggcaatagtcaaattgtgtgaaaggtacttcaaatccttgaagatttaccacttgtgttttgcaagccagattttcctgaaaacccttgccatgtgctagtaattggaaaggcagctctaaatgtcaatcagcctagttgatcagcttattgtctagtgaaactcgttaatttgtagtgttggagaagaactgaaatcatacttcttagggttatgattaagtaatgataactggaaacttcagcggtttatataagcttgtattcctttttctctcctctccccatgatgtttagaaacacaactatattgtttgctaagcattccaactatctcatttccaagcaagtattagaataccacaggaaccacaagactgcacatcaaaatatgccccattcaacatctagtgagcagtcaggaaagagaacttccagatcctggaaatcagggttagtattgtccaggtctaccaaaaatctcaatatttcagataatcacaatacatcccttacctgggaaagggctgttataatctttcacaggggacaggatggttcccttgatgaagaagttgatatgccttttcccaactccagaaagtgacaagctcacagacctttgaactagagtttagctggaaaagtatgttagtgcaaattgtcacaggacagcccttctttccacagaagctccaggtagagggtgtgtaagtagataggccatgggcactgtgggtagacacacatgaagtccaagcatttagatgtataggttgatggtggtatgttttcaggctagatgtatgtacttcatgctgtctacactaagagagaatgagagacacactgaagaagcaccaatcatgaattagttttatatgcttctgttttataattttgtgaagcaaaattttttctctaggaaatatttattttaataatgtttcaaacatatataacaatgctgtattttaaaagaatgattatgaattacatttgtataaaataatttttatatttgaaatattgactttttatggcactagtatttctatgaaatattatgttaaaactgggacaggggagaacctagggtgatattaaccaggggccatgaatcaccttttggtctggagggaagccttggggctgatgcagttgttgcccacagctgtatgattcccagccagcacagcctcttagatgcagttctgaagaagatggtaccaccagtctgactgtttccatcaagggtacactgccttctcaactccaaactgactcttaagaagactgcattatatttattactgtaagaaaatatcacttgtcaataaaatccatacatttgtgtgaaa

SEQ ID NO: 991 - protein, 1470 aa, Homo sapiens; identical to SEQ ID NO: 987

SEQ ID NO: 992 - DNA, 75164 bp, Mus musculus
  misc_feature (1)...(75164): n = A,T,C or G
gggattacttggagatacactttgctgtggattagtgttgcttctttggttggtctgtaagcttaaggcccaaactaggagagacaaggaggttattgcccaggcgcttgcagcactagaacatggtgcttcccctgatatatggttatctatgcttaagcaataggttgctggccattcagctcttgcaccccacgaggctagtctcattgcacgggatagaatgagtgcacttcagcagcccgagagagttgcacagctaagcactgcagtagaagagctctgcggcatatatgagcctattctagggagacatgtcatctttcaagaaggttgagtgtccaagtgtccttctccccaggaaaaacgacacgggaccagaccaggacccctctgggtgatgagcctggaaggaggttatgtgtacggctcctttacctgcacactggggatttgacctctatctccactctcattaatatgggtggcctattgctcttattaaaaggaaagggggatatgtgggaagccgccctcacatttgccgttgcaagatggcgctgacatcctgtgttctaagtggtaaacaataatctgcgcatgtgccaagggtagttctccaccccatgtgctctgccttccccgtgacgacaactcggctgatgggctgcagccaatcagggagtgacacgtcctaggcggaggataattctccttaaaagggatggggttttgccattctctctcttgctctcttgctctcttgcttgcttactctcttgctcctgaagatgtaagcaataaagcttttgccgcagaagattccagtttgttgcgttcttcctggccggtcgcgaacgcgtgtaaggggatgataaatattgttatccatatcatgagtttataactacttcttgttgtattttaggtatggcaccggacagactgaagaaggtgactacctcagtaataaaggaatcagaagtgccaggatcaccacagagaagaaatggatttgtaggaagctgtaatggcagcccttgttaaattacttagcttttttgattatgaaattaattttttatttaaaaatacttatttatttttttcatgtttatattttgagatagagtctctgtatatattcctgcctgttctggaatttactatgtagaccaggtttcccttgaaatcacagaaatctgcctgcctctgcctctacatctgagtgctgttatattaaatgtttatcatggtattcctaatgaaaggggttgtcttataaacagttttaaggggaggttctgattctaaggtctagttgcctaattggttcttgatttgtcaataaagaaggcctggtgccaattgttctgcagaaggtacaagtgggatttccgggtcctaggaagtaaaggcagacacaaaggagagggcctttttctgccaggctttgaaacgaggaggagcatgcagaaatcatgtaagatctcagggcagccagggcctgcagctccactgtgtctgggttgccagagatatttggcaggggctaattggaacagcccacttagtttggagcagaaggaaggatggagtggtggtttggtaagggcatacatttccaggcaggaaatatttgtgcccaccaattgggataagcagcaggttaaggcaacaaagctgtcagagtgtctcttttctgcagattcaaggctctcaggagtgagctgctcctcctggagcagaagttggtagagagagaggccaagttggggctggcagccactgatccaggagccaagccaggtagagtggaagggccccaggaggggctgatagcaatggtcctgggcaaggccatagtgtgattacacaactacagagaacacatggtaaataaggtgtagcagctactttgggattgagactgaaggtttcacaaaccactagatgtaaaactaccatgtcaccaaggtgtatcatccctggtttatactcagcaattttatattttactacacagaaacctgtatactcgatttacaagcttttccattcataatagttaggaatggaaccagctttgatgttctttaagaggtgaatggataacggaaacttggtacacatacaaatggaataccattcacctgtaaagaaaaatgaagtcttggaattttcaagtaaattgatggaactagaaagccttgtagttagtgttgtgacctaggtcctgaaagacaaacactgtatattctttcatgcagaacctagcttgaaatctcttgttttatgtgcttaacttggggcacaagtaggagccaagcaaactagaaagggcatgggctcttttaattcattaaaagttaaatcaggaccagataaagtatctaaacagtcccataaaacctaagtaaacagatgtaatcattaaaagtattccccctccctcaaaaaaaaaaaaaaaaaaaaaaaaaaagcccagggccaggtggttttagcacagatttttaaagaagacgtaataccaatacttctcaaatcattccataaaatagaaatagacagaacactacctacttagttctgtgaagccaaaggtattaagctaatagctaaaccccactaagaccaaacaaagaaagagaacttcagatgtgccagaagagggcatcagatctcattatgggtggttgtgagccaccatgtggttgctgggatttgaactcaggacctttggaagagcggtcaagtgctcctatctgctgagccatctcaccagcccgaaagagaacttcagaccaagtttggatatgaatatctatgcaaaaatactcaataaaattcttgccaaataatttgcagattcatctggaataacaaaaaacctaggatagcaaaaactcttctcaatgataaaaaaacctctggtggaatcaccatgcctgacctaaagctgtactacagagcaattgtgataaaaactgcatggtactggtacagcaacagacaggtagaccactggaagagaattgaagacccagaaatgatcccacacacctatggtcacttgatctttgacaaaggaacaaaaaccatccagtccaaaaaaacaaaacaaaaacaaaacaaaacaaaaaaccccagcattttcaacaaatggtgctggctcaactggcagttatcatgtagaggaatgtgaattgatccattcttatctccttgtagtaaggtgaagtgtatgtggatcaaagaactccacataaaaccagaaacactgaaacatatagaggagaaagtagggaaaatcctcgaagcacaggggaaaaaattcctgaacagaacaacaatggcttgtgctataagatccagaattgacaaatgggacttcatgaaattgcaaagcttctgtaaggcaaaagacactgtcacaaaaaccaaaaggccaccaacacaccaacagattgggaaaggatctttaccaatcctaaatcagataggggactaatatccaatgtatatatatatatatatatatatatatatatatatatatatatatatataacgaactcaagaagatggactccagaaaaccaaatagtcccattaaaaaatggggcatagagctaaacaaggaaatctcaagtgaggaatatcgaatggctgagaagcacctgaaaaaatgttcaagatccttaatcatcaggaaaatgcaaatcaaaacaaccctgagattccacttcacacaagtcagaatggctaagatcaaaaattcaggtgacagcagatgctggccaggatgtggagaaagagggacattcctccattgctggtgggattgcaagctggtacaaccactgtggaaatcagtctggtggttcctcagaaaattggacatagtactactgaaagatccagcaatacctctcctgggcatataccctgacgatgttccaacatgtaataaggacacatgctccactatgttcgtagcagccttatttataagagacagaagctgaaaagaacccagatgtccctcaacaaaggaatggatacagaaaatgtggtaaatttacacaatggagtactacacagcacgtaaaaacaatgaattcatgaaattcttaggcaaatggatgcatctggaggatatcatcctgagtgaggtaacaaaatcacaaaagaacacacatggtatacactcactgataagtggatactagcccagaaacttagaatatccaagatacaatttgcaaaacacatgaaactcacgaagaaggtagaccaaaatatggatacttcattccttcttagaatgaggaacaaaatactcatggaaggagttacagagacaaagttctgagctaagatggaaggaaagaccatacagagactgctctacccggggatccatcccatatacaaccaccaaacccagacactattgcatatgccagaaagattttactgacaggaccctgacatagccctctctttggagactatgccaatgcctggcaaatacagaagtggatgctcacagtcttctataggatggaacacagggcccctaatgaaggagctagagaaagtaccaaaggatctaaaggggtctgcaaccctataggaggaacaatgatatgaactaaccagtacccctgagagctgtgtctccagttgcatatgtagaagaggatggcctagtaggccatcaatgggaggagaagcccttcgtattgatcatataccccagtacaggaacatgccagggccaggaagcaggagtgggtaggttggggagtagggaggcgggagggtgtagggggcattgggatagcatttgaaatgtaaatgaagaaaatatctaataaaaatttaaaaaaaaaaaaaccttgccaaataattccaagtgggttgtcctggtgctctttgtattctgttgttatttctgcttcctcaagaggggatttcctaagtctgaagtgtataatttactcagttgagttcatgtgaaccatctcctcattttaactggtaaaatgaaggctgggtggggcttgtgattaggcagtggaagggaaaggtggggctggaggttttagaggatagaggaagaagaatggaggagaggagcggggaggaagatggagaagcaccacatgtcctggagaagtcgcaagtcagaagaaatctcatagctgaacaaggaatctcatagctggggagtagattaatgtagtggtaatctaaccaatctaggcatacagtttatgaatatcgtaactgagttgtgtgttattttcacaggctttttggggttggagatttactgcaacagactggcacccattgtattgcttagaacccatctaacctgagataaaattccaatttcctctcccctgaataaatagctggggcagccatctaaggctgcaacagcgtgtggattgaaagctgagtgggtctgagtggtctacagagacctgcagagaggctcccttcccaagtcccaggtagacagctacagccaggggcagcaccccagcctggagcctagccagggacaaggaactttggatgtcagccgcctgcgaggtagttttctggcagacacagtgagctttcttggcatctatgcctgagggtgcctttctgtgcttgcttcccagtatctcttgggtcacaggacatgggacagccagaactgttcttccaactgcttgttctccaggctgcctgagatcagcacacaagttggctgctgcaacccaaacaaagagagcctactcagaagcatagaagctgagagtatttctacagtcagccccttcctaccaataaaaagaattggagaggactgcaatgtcatatatacatatacatacatatatatatatatatatatatatatatatatatatatatatatttgattgataatacatatacatagatatacatgtgtatatgtatatatatatatatatatatatatatatatatatatatatatatatttgatacttaaattgagagagataataaatcttttgggcttatatggaatgatattttgaatatcgtaactgagttgtgtgttattttcacaggctttttggggttggagatttactgcaacagactggcacccattgtattgcacattacagggatagatttaaaggaaagagacacctagtcacttactgttattacaatttttattctcttgatttattatgtcttcccataataaatggagccctagattaaaaaaaacttatgtagcttagaaaagggtttcaaggaaacactaaaacgaaaagttcaggattttataactcaagataagcaccagaaagtggagaataaaggttggagaaagaagctggaaaagatgctagaaaaaaaggatgcagaatttcatagatcagactgaacagcaaagagatagagataaaatttggaagcagagtctcgaggataatttatgaatgctactacgtcaaaataaggctgattctacaacatcagaactacaacattaaaattatggaagcagggcctagaacagaagatacagaaatttatagagcagcataaagagcagaaagacacctctcaaatccgttgtctggagggtgatcctatctcgtgccccacgtcgggtgccacttgacccgtccagcaggtccagttattcgagggtctcgaggggaccttctcctaagaaccaaatggagggagggaaagatggaaaccaagtgcaagaacaacacagaagcagtctgagtagcatcaaggtctctctgaattcagcaaggctcaaggcttaaatgcacaagcaaaaggggaagtacttctcagcaggaggaatggggcaggggaaatgcacaagcaaaggaggaagtacttctcagcaggaggaatagggcagtggaaatgcataagcaaaggaggaagtacttctcagcaggaggaatagggcagtggaaatgcacaagcaaaggaggaagtacttctcagcaggaggaatagggcagtggaaatgcataagcaaaggaggaagtacttctcagcaggaggaatagggcagtggaaatgcacaagcaaaggaggaagtacttctcagcaggaggaatagggtagtggaaatgcataagcaaaggaggaagtacttctcagcagtactgagaaatttttcttttggcaactacatggggaagcaggaacttggtggtatcagggtacatcttgtggtcaggacatctggtgctgatttagggctggaacattctgtggttgttcttggaacggtgcgtcggtggcctgctttgaccccctttactattcggggggagaggcccaattcggagatcaagacaatagagttgctttaatagctcccaacaaccatttattgctcttgcagaagactggggtttcattctgagcacccatacggtggcttacacacccatccctaattccaattccagggatccaatatacttttctaaattcttctaaaactaatcatgcatgtagtatacatacatacatgcatacatatatacatacattctagcatacaggccaacaaagcactgttacatgtaagataaataagactgaaacagtcattttaaaagtatatacacatcgcttctcagccttttggctaagtcaagtgtaaaagtatatacagaccccataccctatctcagtttccccattgtctgctgcagactctccctgctcctctatctcagctgtgagtactcacctttccagatgccataaaatgtgtccatgaagcagagaggtcccacctgagttctttcagcttgtcacagcaatgccctctgctcatcactactcacactgcagtgcttatcagtagcatgtcagaaacaagcagtgctggagagatgctgagagaccatgtctacagcactgctgacacagaaccatgctctgagttcagaattttgcatgagtctcaccagcaaatattatacaaagatgttgtgacaggctgtcaggaaacttctagagaagtgagaggaggaggttagtagtggcagttgggtgtctcctctcaaatgaaactgccactccttgtagttctctgacttggtttgcataagcttactgccaggcttagtttagggacgttttgggtaagaagcccttgggatattttgcctgttaaagtggcatgagatagggcaagccgaggcttgtgctctgagttgtttcttgtgttgagagaaggtttaccttgtcatcagcttggggatatttaaatggttgcaaatatgtcattttcacagggatccttaaaggtgctgaaaatattcacataaagatatcttgccacttaaatgcaggctgtcctttccagcatggggatatctgggtggataggagcatattacattttacacttaaatacagctttgtagtcgctgtacaatttagcctaaaaaggtgttagttctacatcaacatcgtcatctgcatcaatgtataaccatcctgttatggagacagtgattttgctcttaaatctaagatgatttttgcccaagacaagttcacaaacactctcccttatttttctaaaaattcaaatgactttatgatattaagttttgtgcttgggtctgtttgtctacaaatggactgtagtagtttgtgtttattttattttgttttgttttcttttcttttattttttaaataaaaatacatctttatgtgtaaaaaaaacaaagaacaaaacccaccatttttccattataaaaatccataaaaagaatcgtatgaattagaggctgcatttgcaaggtgaaaggctgaaaaggttgaatgatgattaaaactgtacaaattctttttaaactaagtggaacctaaattaagtaaacactgttagtcagtgctatgtaacgtggctataaaattcagcaagtaaccacaaaattctttccttccctttttctacttctctgacccagagcttttctctgtactcagactggtcttaaacttttgatccctcttttttggggcagaggggtcaaattaccctttcacaggggtctcatatttgacatcctgcatatcaaatatttacattataattcataatcgtaccagaattacagttatgaagtaacaacaaagtaatttcatggtcgagaatcatcacaatgtgcagaactgtattaaagtgtcacagcatgggcaaggttgagaaacactggtctagaggcattccttgtggtgataaaggtggcagtgggcattatctttctgtctccacaccactagcaaaatgtctccatatgtaaacatgtaatattagacagcctgagtctgtagtcctgaggcaggatctggctccagaacaaagcatctcttattccctgagaggcaagaagtgtgtttagctctgactgtgatccccaactctctcctttctgactctgtctcctagagattctgtctctgggcttttcaacacacagactcctctgaccttgctctgggtgtccctgtaaataatgccctcaaaactcagagttgtaacaccatggggctcacctaccctgaggatcactgtctgatgtgtggtgttcagggcaagaaagaattggtaatattttctttttgttgtttttgtagttgttgtgtgtgtgtgtttgtgtgtttttttgttgtcatcttttatttccaaattgattcccgctggacagtaaaactggtctcatcatccagccccttttggctttgttaaaatctctttgtctacagcattagtttcacttcattacagtctaaagaaatgcctttcttacaatgcttcagtttgagtcaaagaaatttgcacaggaaggaggagctcaagctaccggattggccggttgggttgagttggctaaatcccatatatttgtgcttgtcagctttcaagtttcaatcctatagtggtaactcagcttctcagctctgagatgaacattacaagggcttccctacctatgctcagcaccacttgcagctgcaggagggagaagtgggtatgtattcaagagtatttgaaccaaactataagagcagagaggaacttcaccagggacaggaaggcaaaagagctgaaccttgaacaaaagagtaacagaagggcttctgtgagcctgtcactgtgggcctgcagagcaggagaatgcagttgggattagctatgaggttgttacattagttattctattggagcatacaatagttctcaggcaagagaaatgaacagtgagtcaccttctaagagccagagctgtagctacagctttctttctttgtacttatcttgctagtccactcttctcagagatctggtaaattacagtctggtggattacaccaaattgctgtagtaaaaatttgctttacatgtccctgagtgaagaaaactcagacaacagctttgcaatgtgcatagtgacagaagttgcctgggaagcttggagcttgtgttttgcaaatccattgtaattaaaattgaattgtaaggaggtggcatggggtgggggtgggggtgggggggctgaaaacttccctggaccaattccttcccattttgagttcttgataagttacagaaaaagaatattcccgaaacacagactgttgagaaggattcaactgcatgaattcagaactcttcagctggggaacagggtacccgtaagtatagctttacaaggtaagtctggtcttgaactttctaacgaaattcaagacagtctatcagaagtaaagtggggaatagctttataaggttcgtctggccttgaactttcttatgaaattcaagatagtctatcagaagtaagtgggaaatagctttacaaggtacgtctggccttgaactttctaacgaaattcaagacagtctatcagaagtaaagtgggaaatagctttacaaggtatgtttggccttgaactttctccagtgttaggagcctttttgttccttttcacatgttatcaagtggttaaggcagggctgaaaattctggatgaaattcagggcaatctatcagaagtaaagcggggagagagagtaggagcaaagaggaaatatggtacacaaaataagtatacaggcctttccacgggtcttgaacccgaggaaaagtttaggtcaggtaagaatacatggggagagattagaaggaaggaaaagaaaaaagaaaagaaaaaagatcaattagcggaggtttctaggagaaggagcctatactcatcactagatgagctcaaggagccagctcttagtagctctgaatcagatgaagaattctcctctgaagaaacagacttggaggaggaagcagctcattatgagagaaaagggtaccagccagataaaatgctagttaatcagttaaggaaaaagccaaaagtggctggtgaaggccagcatgctgctcggcctcatggtagtctgcttcaaggtcatagtgcacttctgccctattcggagcccccgccctgggtaaggcgtcagcccggcgcagagaggcaatggacagagaggcaatgtgaagactcattcattcaaaaggaggaacaaaggaaaatgcaacaggcatttcctgtctttgaaggagccaagcagtgttggtgcatgccattaatcccagcacttgggaaacagaggcaggctcttgcagcctacaaggtcttattgtccacactggagttgtagatcaagattataaagggggaacttcaggttctctgttcttgtcctcaagttgtcttttctatatcacaaggggacagaatagctcaactaataattttgccaagcctacatggctgttttccttcctctggtattcctcgagctgccagcgggattggttctactgaaaatgattctgattacttaataatgcctttagattgttgtcaaattttatctacgcctcatgtaggggtaaaccctcgtggcgtcaggccattacaggtctggcaaatggatgtcacgcgtatttcctcctttgggagaaatcaatatttacatgtctctattgacacctgctctggcatcatgtttgcttctcctttaactggagaaaatgcctcacatgtgattcaacattgccttgaggcatggagtgcttgggggaaacccaaactccttaagaatgataatggaccagcttatacatctcaaaaattccagcagttctgccatcagatggacgtgacccacctgactggacttccatacaaccctcaaggacagggtattgttgagcgtgcgcattgcaccctcaaattctatctattaaaacagaaagagggagtcgaggctctaccccgagtaccaagagtgtctatgtctatggcactctttacactcaattttttaaatcttgatgctcatggccatactgcggctgaacgtcattgttcagagccagataggcccaatgagatggttaaatggaaaaatgtccttgataataaatggtatggccctgatcctattttgataagatccaggggagctgtttgtgtttttccacagaatgaagaaaacccattttggataccagaaagactcaccggaaaaatccagactgaccaagggaatactgatgtccctcgtcttggtgatgtccagggcgacaataacaaagagagagcagcgttgggggataatgtcgacatttccactcccaatgccggtgatgtataatgctcaagtattcccctgcttttttaccactaacaaggaactgggtttggccttgttcagacagccttggctctgtctggacaggcccagacgactgacaccattaacacattgtcagcctcggtgaccacagtcatagataaacaggcctcagctaatgtcaagatacagggaggtctcatgctggttaatcaacacatagatcttgtccaggaacaactagatgtattatggcaaatagctcagctgggatatgaacaaaagtttccgggattgtctgttacttccattcagtatgagaaatttactagggcagctaatttgtcaaaaagtctttctcagtatatgttacagaattggacgactgaatttgaacagacccttcgggaattgagacttgccatcattcaggtcaactccacgcgcttggacctgtccctgatcaaaggatttcccaattggatctcctcagcattttccttctttaaagaatgggtgggcgtgggattacttggagatacactttgctgtggattagtgttgcttctttggttggtctgtaagcttaaggctcaaactaggagagacaaggaggttattgcccagacgcttgcagcactagaacatggtgcttcccctgatatatggttatctatgcttaagcaataggttgctggccattcagctcttgcaccccacgaggctagtctcattgcacgggatagagtgagtgcgcttcagcagcccgagagagttgcacagctaagcactgcagtagaagggctctgcggcatatatgagcctattctagggagacatgtcatctttcaagaaggttgagtgtccaagtgtccttctccccaggaaaaacgacacgggaccagaccaggacccctctgggtgatgagcctggaaggaggttatgtgtacggctcctttacctgcacactggggatttgacctctatctccactctcattaatatgggtggcctattgctcttattaaaaggaaagggggatatgtgggaagccgccctcacatttgccgttgcaagatggcgctgacatcctgtgttctaagtggtaaacaaataatctgcgcatgtgccaagggtagttctccaccccatgtgctctgctttccccgtgacgacaactcggccgatgggctgcagccaatcagggagtgacacgtcctaggcggaggataattctccttaaaagggatggggttttgccattctctctcttgctctcttgctctcttgctctcttgcttgcttgctctcttgctcctgaagatgtaagcaataaagcttttgccgcagaagattccagtttgttgcgttcttcgtggctggtcgtgaacccgtgtaagtgaatataatggggttttctacttcagccttcagaaagtaagcaaaattatgtttcttgtgtttcaaactgtatatgcttcattatattgtgttcctttattttcctttttctctcatttctgtttcttcatctctttttgtcatttattgaagaatactggattttgagaaacaagattgatatttatcaaaatacaaaattcacagcaaatgttaatgcttatcacttaagccaagtattctgactgaaactattattattattactgataatgatgatgacaattgattgattcttcagcatttccaataatgttaggacaatgacatctcaagaagaggaaatatgaagcatttagtcaatagaaactgagtttagataaagaagcaacaggttaaatctttgaaagcttgaacttgcatattgtttttgtgaggtcattaagaaatctggcagttgtgagggtggtggtggtgcttgcctttaatcctagcacttgggaggcagaggcaggcggatttttcagttcgaggccagcctggtctacaaagtgagtttcaggacagccaggactatacagagaaaccctgtcttgaaaaacccaaaaaaaaaaaaaaaaaaaaaaaggaaagaaataaagaattctggcaggcagccttagctagttaacgaatatattaatgcatgcgtatcatggtggattatcttagggtaaggagctaggtctgttttctagctgtcaagctacaatagccaatggtgtcagaatcctggggaagaataaattttaatctttgagttatatattaattaaaaaatgacagagtttatctatagtccaaacagttcccaggtccctatgatctgcatggcaacttgggtggagtcactagggctttcaagcccagaagaaggaaggccttgccctccttggaacaggtaatgcctggaatgagaaattattgaccttcactcaggcaatataagtcacttgactcttagaatatccagttttgtccacagtgtttctcagtggttgtcataccacaatctaggcagtctcttgcagctgtgtctatatctcccgagtccttggggatatgctgttaggctttgggagattctgtctgtcataaacgtattaattattagcagacttgtgagaagattgaaggctatatcgattggtcatatctgagtcagaaaacttatgtttgttaaattatttgtttgagaatgtatatagtaaatatagcacaatataatttgctggagctggggaattttgacccgttctgttgctggtccacagagcgagacaggcatgcatgcatattttgttaaggcaccaggcaagtgcctagtccaggggcgtggcatgtgcatgcagcctgaatagcacagattgtaaggagtcacaataacagcttgcatgccccaggtagctcaggtggtgatggtgtcatggggttggggtggtcctggggtgtgcagggctcatacacaagtaggtggggtggggcttcctcctagcagccagaagctctggcacagtgcttccagctgcaggctggtgctgccctatctcacctagtgggtaagggaagggaagtacctgagttagctttcagtctcctagcaaattgtgcaatatcccaacagcaggcagctcatgctcatttcatgagtaatgagcagagtgtgtgggaggagagtgagagagaagagagagaaggcagagagagagagagagagagagagagagagagagagagagagagagagagagagagacccatgcacaggcacgtgtgcatgggaatgagcacaaatagcagggcagacagagttcctggcaggaagcaaggggcagggccagacctgcttttcacttggtgaaccaggaacagaccaaatagcaagagaatgagggtattcccagctggcagcagccaccaccgcaggggggctgttagcaagcaaactatggaggggtgggggtgggggtgggggtggggatggatcactatctagagagttgttttaaagtgccagtttagtggccatgtagagatagtccaggaaatcccagtaaatagggacaaggcagcgaagaccaacccatggatgagaatattatcctacacctaccagcattttaaggatactattaataaccagagaggctgacagccaggccagacaaccaggtcatcacatgatgggctgggcctaagctctgggcaggtgccttgagcaacagagagcatttcaccagtcctgggatttctcaacagagagaaaggaaccttcccagaggagagggggaaatctcaccaaagggaaagtgtcctagggaaggaccagggtagctccaagctcaagaactctccccggggaccgtggggacatttacactggccagtgtgggcagggtgcttaccagttctcacaggtttgggctagtgagcattggctctccatgtggttgcaggaaggatgcagggaggatgtaaacctgttgagtttctaaatctgagtctcagtaccaaatgttgtgcttataaaaagataaggagggaaggaatttgattggtggatgtgtagcaaggtatggtggaaggggctgcctctgtgggcccatggataggcatcccttccccctgaggaacaagccacatgcatatagtatattcagggcatggggaggggagttgagagggtaggagagagagaggagaaagagagagagagagagagagagagagagagagagagagagagagagagaagactagagtagaggctgaccatgaatgcatagagaaaggggggaggggaagggggagagaaggggaaagggccccagagaacatggtgagagcaagaaggcaagagagcaagagagcaagagaacagaggaggggagcagccccttttacaatgagtcaggcacaccaggctgttgccaggtaactgtggggcagagcttagacaaaaggtgaacaccactgatctaagaatagttatgtattcagaaacttgaaagcagctcaaaataaaatatctgcctatattttgcagaaggtttttaaaaaagccaatggtaaacttgtagattagattagctcaagcagaaatcagttggtgacaattgagctatcagtaaaaaacaaaccaaaatactacaactgtgtgatcagactcttaagctcctaaaataagctggactacagctggttttatggcttactctagagcttgctgagagcccaaagctgaacaacatttggacagagtgacagatgatcaggggcaagtatatggtcaaatttttcctttgtaatgcccctgcctcagtgctcagtcatattgattaacactgtcaacattggtggatatttgtgttgtgaatttaacaaacattggtaattaaaaaatatttttttattattctttaatcttcttttacaatccagtagttatcccattcccagtctgccctccaactgttcctcatcccattcctactcccttgagttcaaaaggatagccccacccctcaacccccacaccaccaaacctccccacattctggggcctcaagtctctagagggttaggtgcatctcctctcactgaggccataccaggcagtcctatgctatatgtgtgtcggggcctcatatcagctagtctatgctgcctggttggtagctcagtgtctgagagattttgggggtccaggttatttgagactgctggtctcctatggggtagtccttctcagctccttccagcctttccttaattcagtcacaggggtcagcagcttctgtccattgcttgggtctaagtgtatgcatcaggctctttcaggtgttatttgagggcagtcgtgctaggctcctgtctgtaacacaccatagcttcagtaatattgtgtcaggccttggagcctcctctagagctggatcccaatttgggctggtcactgaatctcctttacctcagtctcttctccatgtttgtctctgcagttcttttagacaagaataattctgggtcataggtttcgaccccatccacttgatgccctgtctttctactggaggtagagtctacaagttccctctccccactgttaggcattttgtctagggtccctcccttttagtcctgattgtctcttaactcccaggtctgtggtaattctagaagtccccaacccccacccctggctaacctcctgcatacccagattccctgtttctattctttctgcctgccctcagggctttgaccctgttaactcactaatacctgatcatgctccccttttcccctccctgtcccctctccaaccaaggtgcctcctccctctgcctcttgtggttgctttcttcttcctcccaagtggtattgaggcatccacacttgggcccctcagtttgttaaccttgacttctatcctgggcattctgtactttttttggctaatataaacttattagtgagtacatagcattaagaatctctaaagtcactgccaatactcataatgatggaaacacagattttcatgtcttcttgtatgaatatgtgggtaggagggccagagcatataatatgtatattctcatttgcagaaagtagtgatgtgttttcaactgcctttttccaatcccagtagcaatgaacatatataatgccattgcatgttcaaatatttggcccattcttattctttttttctctttaagtaaatgaaatctccaaactatcagaatgctctagatacaacttcttgttgatctatatcttacaaaaattgcaaattaactttgtcgaactcggaaaagaaggatttctttttttgtttttgttttttgttttttgtttgatttttgaattagagcaaagtaggcatatttcagtttaagctaatgtggataaggattttgatattacacatgagatatttttattcaaggcaagttcacagagatttttctttttaattttcctcagatagttttatagccctaggcttcatgtttgagtttccttttgtaggaggaggtgggagagagtgagacacagtacagtgtgcgcagcaaggccagggtcaacctcctgggataactaactataagttaggcccacatgtcagacttacttctcaagttattttattattttttttgtatttttcttttattattattatgattatcattattactattaattaggttcatgtatctatgatttcaccaaagccacacttatatctttgtttctgtcactctgatttggtggtatcacttctgcaaatttggcctcattttctaaattgttcagctagactgattctattcccttttcatgaaatttaaaatttactttgtgctagagagatagcatgtggctaaaagcactgactactcttttggggaacctaggttcggttcccagtgtcctcatggcccctcacaaccgtaatctcagctccagggaactcaacatcctttcttgtctcctcaggcagcaggcatgcatacagcacatacacagacacacatgcaggcaaattacccatatgcattatatacaaatacattttaaatgaataaaattacctttctgattttttgaaatgcccaatatccacaaatgtgttccttcaattaatttctcacttgctaatagattttgttattttagactaatattcgtttttcacatgattttggtaggcttgttaaaacatccccatatttcatccaatagttatgccagtgtgctctattacacttatgtgcctttattaattaatgtatttattgactagtttctttgaggttgatccttacatagtccaggttgagttcaaacttccaatgtagccaaggctagccttgtcctcctgactccagcttctgcctccctagcactggaaatataaaagtgtaccaacctgtttgtttcattgactggaacaggagttacacaggtggttatgagctgcccctttaagagctgggatttggaaatcaacaagggtcctctagaagagcatcaactgttcttaacccctcagtcctaaccagtatattctgatggaacaaaatctatggatagcttggttgttgtttgctttcaacctgatctttactccttctgtttcttgcctcttcatttacccttagttcaatgactggacgactccatgttttcttttcctctagtcttctgtgagtgatgacatcatttatagaccaggaccttctgtaaaggggtttgcagtgggtgaatacaagcaaaatctacacataattgttaaatgtttcttgagattgatattctcatattaatattttttaagtaaaatggttcaagaaaaatgtctcagaatcgtctcccccaagtattctgctctgctttactgcctctgtggagtgatcatggtcctcactgtagctgtagttgctcatttttttgctttcagaggcaagtgacttattgtacaaattctgtggtattctgtccaccttaacattgtcagttatgttcaatgaccactgtgaaacaggcattgtgggaaggactctaaagaaaacacagtggaagttcctgttctttggaaacttaggtttgatcaggaagatgctgagaaggaatagcacaggctgtgatgggcacaggaggcccggctcatcatccctgggaagataacacccagcaggctctacacagagatgcagaggacataggtacacttggggaaactgtctaaggtagagaacaaggaaagaaaaactccaccgaggaacctcaaggaagggtaaagacagagaagagtaatgtggtcaggaaggtacagtgccatgatccatgatccatgagtttagttaccaggctcaactgtactttgaatgtattaaaagcagtttctgaagtcataaatttataggttttagtacctcactgttcagaatagtgtaataaaatcttacactgtcctcttaattttgtgaatcatcctttagtgcaacatgtctattctgtatacagtacctacccaatagttctcactactgtctcaattattaggatggctgtcaataggtgtccctacagagtgatgacatcatttacagaccaggaccttctgtaaaggggtttgcagtgagtcaatacaagcaaaatctacacataattgttaaatgtttcttgagattgatattctcatattaatattttttaagtaaaatggttcaagaaaaatgtctctattagtaacccctattgtagtaactgttgacccaaatctcagatagtgatgctagtatagaaatgcacttcctggaagcctactgaaagccagcatctgagactgagtgggacataggcccaccatgctcgggggaggattcctacagatcacctgggaaagctacaatcacattcacagctcacagctgagctcaggagggtattccaaaaagagccaaagcatgtgtgctttaattcattgtattgtctaaattttagtgagaatgacagaacagatctcaatcaaaaatacctatgctgcttgcccgagaaactggattggatttggaaataaatgattttacttttctgaatactcaagaaaggggacattcagccagaccttttgcatggcacacgaggtccaactagatcagtttgacaacaaggaggagctgtaagaaatagtcagggattggtttgtctgttgaaaattatattaccttgagatagagataaagcatgaggaagaatcccatcccaagcatgtggagacatggggaatgtgtgagtgtgtaccaattgctgatgctagacttctgagtggagtcctgagacattcaagaaatattctctcacatagtgctcataatcatctagaaggtcagatatgccattttactgggatacctggtggtcatgagtgttttcctgttaaatgacacatgttgcatactgttaataactgcaatagaaagttagcccagaactattctggccacagaagaatgtatcattacatttgatactttaattaaaatggcatactttacaatgactgatgtcaagtggatccactgagatcgggagactaatatacctccaaattctgtgaccctcagttacaccctcctgttacctctataggtagctgtggagtagagagactccaggattatatgaaacaaagacacccatgtattttggctttttgtgttttatgacagaatttcctagggagatacgaggggacttttgactactggatcggcctgcacagagcgtcgtctaagcacccttggatgtggacagacaacactgagtataacaacatgtatgttttcacaatgtcttcccttctgtgttcatgcattgtgacatgcatgagttgtggctatgagggttgaatggttccatgaagccaactgtactggaatggaagaaaaccaactcttggactggaaggtgtgccgtgggcttaggttctgtgcctcataaaatagcctatccctaaaaaattccacattctaacaattttttttttaatttttcaagacagagtttctctggatagccctggctgtcctgaaactcactttgtagaccaggctggcctcaatctcagaaatccacctgcctctgcctcccaagtgctgggattaaaggcatgagccaccacaccaggcacatcctaacaaatttaaatcaattggatactctcccatctactagccatcttcttcaaagcatttacatagtgttatttccctcctaatatttagcaccatgttggcatctgaggtagatgttgtctgctatcatctctttaaaatctttccttgatgataactgccctggcatgatgtagtcagaactgatggccaagggctctaaaaccataggaaagtactacagaactgcaagcctgagaattatcagtcttctgtttgcaaggttgtacctgttcacagaagcagagactccaggggcattgagagtgtctcctaaggccttgtcatcaatgatcactggggacagctcttgaatgtgagcatagccattttgaacagacccatttcattggaagggtaaaacaaagaacctttcatattcataattaaatactttctagcaatttattaagtggtatattttctctcacttttttagatgttcaaaaatacttctagagggcattgaaaattacccttgtgaagctacccagtgcttcatatcatttgaacatggcagcaaacattgtgcacacattccagggtgaaacacagatatgtgacagaggtatggtgatcaaaatcaaatcctgaggatgtgcaagtctctaggtgcaaaagtagtgcatgggattctggtggacgctgctgatccatatcataaatatgtggtgaagatgagtgagataggagtgaatgcaatggcagactctgcagaaatctatttatttatttatttttggctttagggtttccatccaaggagttgaaaaacatggttttctgagtgacaatgggatcagcagtagcagggactacataaataggaagtggatttgtagcaagtccagcaactaaactttatagtaccagcagttttgtacctgggtagagagcacgtcatagcaatcatgaggaacacataacaagttttctactgttgctgcttcattaatgatctgctaaatttatcatcacaagtagtgggtaatacatggtgacatcaaagatgaaaactctctctgaggactgttgatgtgtgtacttgggagatcatgaagagttctacattaaataggtattcagctgatgtggggcattggtctctgcacagacaggctggtctccaggtgagctgaggtctgaaccctgatggtcataattcactttcatgacatggtaggtgttccttcatgctccttgaactctggcctctgcctaagttactgccccccacaccctccacaannnnnnnnnnnnnnnnnnnntctgctccatcaagatctactgcgcaatctggtcagtgttgggaacctcttcctttatccctctctcccataaccccggggatacagggtgtggccctggggcccccaaggtcaggggctgccccttgaccacccctcaacgagtgggtcagaggcttggatgcccatccgaggctgagtggaaagtgtgtggcagctgtcctgcctccacctgcccagagcataggaggaactctggctggacataggccattttccactccctgtgtaccagggtccccttttttagttcccaacaagctggtactcatatctaaaatataaactaaatcacatcagtattagtaacatctactttttttctcttttcttattattttatttatttgcattccaaatgctgtctcctcatggttcgcctttccagagttcttcactccataccccctcccctttacttctgagggaatgttctcctcaccaccatcccctcacccatccccatcctaccccactcattctctggggaattagatctctacaggattagatgcatcctcttccactgagatcagacaaagaagtcctctgctacttatgtcctgggggccatggacaagcctatgtattctctttggttggtggcttagtctttggtcctaacgggccaggttacttgacactgttggtcttcctatggagttgctatccccttcatctcctttaatccttccctgaacccgtccataggtgtccctgacttcagtccaatggttggctgtatctgtatctgtctaagtcagctgctggtagagaatctcagaggatgcacaagtctgagtggtgtgaagtctaactgtcctctgaggggaccattacaggatgtaaagaaggaagatgctgttattccattatctaaactaaggcacacaagtgataaatgtattgcttgtcttgacttaattgactacatgcagcttgcccactccattgttcccttattgttgtaaaattctgggccaaagtcttacaggggacctggctgcaaagactgattcaaggtccctgaaaccaggtgtccctgacaagtcccagtcactaatgttaacttccttgtcttaagcccttgtgtataaatatgctttgtcaatgcaacagtctaccctgctccccctcactttgtgtttccattcaataaaatgtcgtataatcttccttcggagttgtagtttagaccctgaattagcagcctcctggagcattcagaaaactaagcttttatttttcatcttctttctctaaggtgagttttctcagcttctaccctgaaccctacaaaagttctaatattctgtgcctgttttgaatttgtttttattattggacaaacacaagcatatctcattcaggaaaatgtgtttcttagtgttctgtttctatttcatttcaccttgttattttttaaatccatttcattttagataaatggtgtgactctgttcctaatataaagaaatactttctcatatcgaaattacttttcatttagcagttttaattattgtatttctagcacatgttaatctcaaagatggaaggagaaaaatcactgacccaaatcattatggccaaacttattgaagcaagtaattaattgaaacaaaatcatggttactaagatgacataacaagatagtcatagcaactggtagtcataccaagttagtcatagatggtcatataacccgttgaaactaaggtagggttttttttttttattccctcccccccaaagttcggtttttattatggttataagccagttcttgaagcaaagacatgattgccatttctggaacatacagaaccacttgtagttaaagttccaggtgggataaagtccaatccttgagaaacaggtttgactataaacaggaatgaacctagtttgtctttactataagatggcttttaagcctaagatggagtcagggtgattcttcnnnnnnnnnnnnnnnnnnnnnnnnnnnnnnnnnnnnnnnnnnnnnnnnnnnnnnnnnnnnnnnnnnnnnnnnnnnnnnnnnnnnnnnnnnnnnnnnnnnnnnnnnnnnnnnnnnnnnnnnnnnnnnnnnnnnnnnnnnnnnnnnnnnnnnnnnnnnnnnnnnnnnnnnnnnnnnnnnnnnnnnnnnnnnnnnnnnnnnnnnnnnnnnnnnnnnnnnnnnnnnnnnnnnnnnnnnnnnnnnnnnnnnnnnnnnnnnnnnnnnnnnnnnnnnnnnnnnnnnnnnnnnnnnnnnnnnnnnnnnnnnnnnnnnnnnnnnnnnnnnnnnnnnnnnnnnnnnnnnnnnnnnnnnnnnnnnnnnnnnnnnnnnnnnnnnnnnnnnnnnnnnnnnnnnnnnnnnnnnnnnnnnnnnnnnnnnnnnnnnnnnnnnnnnnnnnnnnnnnnnnnnnnnnnnnnnnnnnnnnnnnnnnnnnnnnnnnnnnnnnnnnnnnnnnnnnnnnnnnnnnnnnnnnnnnnnnnnnnnnnnnnnnnnnnnnnnnnnnnnnnnnnnnnnnnnnnnnnnnnnnnnnnnnnnnnnnnnnnnnnnnnnnnnnnnnnnnnnnnnnnnnnnnnnnnnnnnnnnnnnnnnnnnnnnnnnnnnnnnnnnnnnnnnnnnnnnnnnnnnnnnnnnnnnnnnnnnnnnnnnnnnnnnnnnnnnnnnnnnnnntgaacaatgaattaattacaaggtctgagctataggttttgtttgttcggtgaataaagtgaagacaggacaattccaaggtatgcataagggggagactttttattgtagatatgtgagagagtacaggcagaggcatctagaagagtctacagcagggaaagaaactaacagactgagtgtggctagcctattcagcgtggccaagaaagatgagagaaggaaggagaatgagagaggaagacatgagacagagagagagagagagagggagagagagagagagagagagagagagagagagagagagagagagagagagagagagaatcactaaaatggcagtgttgtgtagggatgagatgctgacagaaacaaggctaatgagctggagaagtttgtgggaggggtcagggtaagaagagctgtgaggagccaaagaactaagtgagcctggaggccagcttgcattttgttatgatagtagacatgaaagtcagccatttgtcctgagtttgttttctacccgacagttggtttatttgagtttgggattttgttttctttttgatattttcttttttctttttctttttcttttgctttttggcttgtttttcgtgtgtgtgtgtgtgtgtgtgtgtgtgtgtgtgtgtgtgtgtgtgtgtttagcttgctaggacactctggtgaattagaggatgttgctgtagaacatgctccttatgtccctgagtgaagaaaactctaacagcacagctttcaatgtgcacagctaaggaagttacctgtggtactggggcttgtgtcttgaagatccacagtgcttgaaaagaaaggggagaggtgaggtgcagtgtgaggctgtagcctcccccagcctttagcaggctgattcagaccttgctgccactgtgaaggagaccacttggagtgacctagatggttctattgttctgtgctatggctgagtggctgaacctatcttcctgagctattcctgagagagctgacaacctgtggaattgaagacctaatgctaagagctctggcagactaagtgctagctacttagcaacaaagcatcaagaagcctggcaagtcaggggatgggcctacccctttgtaagcacagactcttagtaaacattgggccttgatcagaattttgtcttggtctcctttctattttttttattaggtattttccttgtttacattttcaatgnnnnnnnnnnnnnnnnnnnnnnnnnnnnnnnnnnnnnnnnnnnnnnnnnnnnnnnnnnnnnnnnnnnnnnnnnnnnnnnnnnnnnnnnnnnnnnnnnnnnnnnnnnnnnnnnnnnnnnnnnnnnnnnnnnnnnnnnnnnnnnnnnnnnnnnnnnnnnnnnnnnnnnnnnnnnnnnnnnnnnnnnnnnnnnnnnnnnnnnnnnnnnnnnnnnnnnnnnnnnnnnnnnnnnnnnnnnnnnnnnnnnnnnnnnnnnnnnnnnnnnnnnnnnnnnnnnnnnnnnnnnnnnnnnnnnnnnnnnnnnnnnnnnnnnnnnnnnnnnnnnnnnnnnnnnnnnnnnnnnnnnnnnnnnnnnnnnnnnnnnnnnnnnnnnnnnnnnnnnnnnnnnnnnnnnnnnnnnnnnnnnnnncccactccccctttttggccctggcgttcccctgtactggggcatataaagtttgcaagtccaatgggcctctctttgcagtgatggccgactaggccatcttttgatacatatgcagctaaagacaagagctcccggttactggttagttcatattgttgtttcacctatagggttgcagttccctttagctccttgggtaatttctctagctcctccattgggggccgtgtgacccatccaatagcttactgtgatcatccacttctgtgtttgctaggccctggcatagtctcacaagaaagagctatatctgggtcctttcagcatctgggttctttccagattctggctattataaacaaggctgctatgaacatagtggaacatgtgttcttcttaccagttgggacatcttctggatatatgcccaggagaggtattgcgggatcctctggtagtactatgtccaattttctgaggaaccatcagactgatttccagagtggttgtacaagcttgcaatcccaccaacaatggaggagtgttcccctttctccacatgctcgccagcatctgctgtcacctgagtttttgatcttagccattctgactggagtgaagtggaatctcagtgttgttttgatttgcatttctctgatgattaaggatgttgaacattttttcaggtgcttctctgccattcggtattcttcaggtgagaattctttgttcagctctgagccccatttttaatggggttatttgattttctggagtccaccttcttgagttctttatatatattggatattagtcccctatgcgatttgggataggtaaagatccttttccaatctgtcggtggcctttttgtcttattgactgtgtcttttgctttgcagaagctttgcaattttatgaggtcccatttatcgattcttgatcttacagcacaagccattgccgttctattcaggaattttccccctgtacccatatcttcgaggcttttccctactttctcctctataagtttcagtgtctctggttttatgtggagttccttaatccacttagatttgaccttagtacaaggagataggaatgtattaattcgaaatcttctacatgataacagccagttgtgccagcaccatttgttgaaaatgctgtcttttttccacttaatggttttagctcccttgtcaaagatcaagtgatcataggtgtgtggattcatctctgggtcttcaattctgttccattggtctacttgtctgtcactataccagtactatgcagttttgatcacaattgctctgtagtacagttttaggtccggcatggtgattccaccagaggttcttttatccttgggaagagtttttgttatcctcatttttgttattccagatgaatctgccgattgccctttctaattcgttgaagaattgagttggaattttgatggggattgcattgaatctgtttgattgcttttggcaagatagccatttttacaatgttgatcctgccaatccatgagcatgggagatctttccatcttctgagatcttctttaatttctttctttagagacttgaagttcttctcatacagatctttcacttccttagttagagtcacgccaaggtattttatattatttgtgactattgagaagggcgttgtttccctaatttctttctcagcctgtttatcctttgtgtagagaaaggccattgacttgtttgagttaattttatatccagctacttcactgaagctttttatcaggcttaggagttctctggtggaatttttagggtcacttatatatactatcatatcatctgcaaaaagtgatattttgactttttcctttccaatttgtatccccttgatctccttttgttgtctaattgctctggctaggacttcaagtacaatgttgaataggtagggggagagtggacagccttgtctagtccctgattttagtgggattgcttccagcttctcacaatttactttgatgttggctattggtttgctgtagattgcttttatcatgtttaggtatgggccttgaattcctgatcttcccaagacttttatcatgaatggatgttggattttgtcaaatgctttctcagcatctaacgagatgatcatgttgtttttgtctttgagtttgtttatatactggattacattgatggatttccatatttgaaccatccctgcatatctgggatgaaacctacttggtcaggatggatgattgttttgatgtgttcttggattcggttagcaagaactttattgaggatttttgcatcgatattcataagggaaattggtctgacgttctctttgttgggtctttttgtggtttaggtatcagagtaattgtggcttcatagaatgagttgggtagagtaccttctgtttctatttcgtggaatagtttgtgaagaactggaattaggtcttctttgaaggtctgctagaactctgcactaaacccgtctggtcctgggctttttttggctgggagactattaatgactgcttctatttctttaggggatataggactgttgagatcattaacctgatcttgatttagctttggtacctggtatctgtctagaaacttatccatttcatccaggttttccagttttgttgagtatagccttttgtagaaggatctgatggtgttttggatttcttcaggatctgttgttttgtctcccttttcatttctgattttattaattaggatgctttcccctgtgccctctagttggtctggctaagagtttatctatcttgttgattttctcaaagaaccacctccttgattggttgattctttgaatagttcttcttgtttccacttggttgatttcacccctgagtttgattatttcctgccttctannnnnnnnnnnnnnnnnnnnnnnnnnnnnnnnnnnnnnnnnnnnnnnnnnnnnnnnnnnnnnnnnnnnnnnnnnnnnnnnnnnnnnnnnnnnnnnnnnnnnnnnnnnnnnnnnnnnnnnnnnnnnnnnnnnnnnnnnnnnnnnnnnnnnnnnnnnnnnnnnnnnnnnnnnnnnnnnnnnnnnnnnnnnnnnnnnnnnnnnnnnnnnnnnnnnnnnnnnnnnnnnnnnnnnnnnnnnnnnnnnnnnnnnnnnnnnnnnnnnnnnnnnnnnnnnnnnnnnnnnnnnnnnnnnnnnnnnnnnnnnnnnnnnnnnnnnnnnnnnnnnnnnnnnnnnnnnnnnnnnnnnnnnnnnnnnnnnnnnnnnnnnnnnnnnnnnnnnnnnnnnnnnnnnnnnnnnnnnnnnnnnnnnnnnnnnnnnnnnnnnnnnnnnnnnnnnnnnnnnnnnnnnnnnnnnnnnnnnnnnnnnnnnnnnnnnnnnnnnnnnnnnnnnnnnnnnnnnnnnnnnnnnnnnnnnnnnnnnnnnnnnnnnnnnnnnnnnnnnnnnnnnnnnnnnnnnnnnnnnnnnnnnnnnnnnnnnnnnnnnnnnnnnnnnnnnnnnnnnnnnnnnnnnnnnnnnnnnnnnnnnnnnnnnnnnnnnnnnnnnnnnnnnnnnnnnnnnnnnnnnnnnnnnnnnnnnnnnnnnnnnnnnnnnnnnnnnnnnnnnnnnnnnnnnnnnnnnnnnnnnnnnnnnnnnnnnnnnnnnnnnnnnnnnnnnnnnnnnnnnnnnnnnnnnnnnnnnnnnnnnnnnnnnnnnnnnnnnnnnnnnnnnnnnnnnnnnnnnnnnnnnnnnnnnnnnnnnnnnnnnnnnnnnnnnnnnnnnnnnnnnnnnnnnnnnnnnnnnnnnnnnnnnnnnnnnnnnnnnnnnnnnnnnnnnnnnnnnnnnnnnnnnnnnnnnnnnnnnnnnnnnnnnnnnnnnnnnnnnnnnnnnnnnnnnnnnnnnnnnnnnnnnnnnnnnnnnnnnnnnnnnnnnnnnnnnnnnnnnnnnnnnnnnnnnnnnnnnnnnnnnnnnnnnnnnnnnnnnnnnnnnnnnnnnnnnnnnnnnnnnnnnnnnnnnnnnnnnnnnnnnnnnnnnnnnnnnnnnnnnnnnnnnnnnnnnnnnnnnnnnnnnnnnnncctgccctccgcggagtcccggaaccaagggtggctcccgccagagcctgaggaagaaacatctcccggccgggcggacccctgtgctctcaccaggaaggtggccggttgtctcttggtctcctttcttctctctcatacagctctggccttccactcaggaacctggttcctgtggcttcaggcagctacatgaggctgggtacccagaagcaccaacaaattctctgacgttttcggtttatggtaaatcaattcttggccttttggtgaagatcaagtgtaggattatggtaaattatggaaatgaagaatcctgtgcgagttctgtttcaatcttctgaaggaaatctgtcttctgtggtttgaaaaatgtctgtttcagagttttgttttattcatttcttccctctttccttactttaactcctgtttacttgcttgtttattttagcaaaattatattgggtatcctgggaaacaatgttcatacatcacaaaagagcacgtttgtgaggaatgtaggtttttttttaaaatttaagtcaaatatacccatacctgaaaaaattttctttcttttcccttgcaacaactccaagttttatgagagaatgtagcccagtccaggaattcatcttatcattctatctgggtttgtatatacttgacattttccatttcaaacacctagtgttcccatttcctctctgttccacagttacctggcaatggccaggtatgcctgactcattttaaaaggggctgcttgcccccttcactttttttttcctcttgcttcttgctcctgctctgtcctctcaccgcccttctctctccattcccctcctccctctctgcccacatactcatgaccagcttctactattctactctctctgtctctctctctttgtctctctgtctctgtctctccctttctgtctctaatatcctcccaaatctcctcctcatgccttaatgaactctattctatactaaactgttgtgtgtctagtcccttagggggaagggatgcctcagcatgggtttgtagaggcaccaccttcccacatacctgagtacacctctaccaaccatattccctcttaccttatctttttaataaaacacaacatttggtgctgagattcagatttagaaactctgcaagtttgcattctccctgctaccacatggagagccagtgcttgctctctagcccaaagttggacaactggtaagccctctccccctactggccagtgttaatgtccccatggtcccaggggaagagttcttgagctcaaatctatccctgtgctgcccttgaggatggagacattcagtcttttcactgaccttcattcttggacatttccccttgagtgagattttcctctttagtctgagatggttcctttctcactgctgagaaatcccaggcctgggtgaaccactctctgttgttcgtgacactggtgcagagcttagccctcagaccactatgtgataacctggtgatttggcctggctggaagtctctctggttattaatcgtatcctcaggtcgctgttaggtgtagttaataaccctactaccactcaatacattggtctttgcttccttgtcctgacttactgagatgtcccagtctaattcacaatatgcagcaagcaatatttctacatagtcactaaactggtactttaaaacaactctcttgctagttatgctctgctcccaattcaccctgtgaaaaatgggtctggctctgccccatgcaggggactttgctttcctgcacatgtaatcatctaccaaccatatacttgcactctctcatgtgtggggctcctgtactctgcctgccaatgctgccaccacctgtgcctggcctctcaacctctgccaaagccatgaggaaagcagttttcaccattcccccttgcacttcctgtgctctgcccaggactcatgaagtgagctggaggtccactgctgctgcagcaggaaaagcactcacacagccctgcactgctgttggtgctgctgtcccacatctgagggaatggcaggactgctgcaggcatacttttattcaggtgtctgctgccaggttctcccatctcagtccctcaccgcccctgccttttaaaatccaccttgagtggagttgttagaagatggacctctacttcatgtgcttcctttcccctgccccacacccaccacagactgtgacaggcagggtggggcagtgcctgcccacagccagaagtactgggctggtacttctggctgctaggaggaagtcccgccccacttgcttgcctacctgccttccctcgatcctggtgctgctgggcccacttcatccatgacccatagcaggctgggtgcccaagtgagccacagcacagtcctgattctttgactctgttgcctccaccattgtggctcctcaccatctgtgctcttcaggctgcatatgcacgtcccaagcctttgacacatgcaatgcgtgcctgtctctacctttgcttactggtcaattcccactgcctgcccatctgctcaatttgtgccacaggcctgaacccatttggacacactcacttttctcaccacagtctcaagccaccactgtcagctctctcatttctttacattctggtctacagctactctaagccaagtgtttctctactaatgcaaaatgtgtttttctatattatacaaagtgttaaacttacttaataattaagatgttcatttctatcctgccttgggaaataatgatttttactattactactaagttatgctctatttactatataccttcttaaacaaataatttaacaaacacaagttgtgtaactcaagtatcaccaatctatacagttctcagtcttctcagaagtatgctaattattaatacatttaagtttatgacagacagagactcccaagataatgggtttagctataagagagtgcctggattgtggtatgataactactgagagactgtgtggacaagactggatacctaagagtcaagtgactcatattgtctgaatcaaggtgagtcatttctcatttcacatgtatctattccacaggggnnnnnnnnnnnnnnnnnnnnccatctgtgctcttcaggctgcatatgcacgtcccaagtcctttgacacatgcaatgcgtgcctgtctctacctttgcttactggtcaattcccactgcctgcccatctgctcaatttgtgccacaggcctgaacccatttggacacactcacttttctcaccacagtctcaagccaccactgtcagctctctcatttctttacattctggtctacagctactctaagccaagtgtttctctactaatgcaaaatgtgtttttctatattatacaaagtgttaaacttacttaataattaagatgttcatttctatcctgccttgggaaataatgatttttactattactactaagttatgctctatttactatataccttcttaaacaaataatttaacaaacacaagttgtgtaactcaagtatcaccaatctatacagttctcagtcttctcagaagtatgctaattattaatacatttaagtttatgacagacagagactcccaagataatgggtttagctataagagagtgcctggattgtggtatgataactactgagagactgtgtggacaagactggatacccaagagtcaagtgactcatattgtctgaatcaaggtgagtcatttctcatttcacatgtttctattccacaggggaaaacaaaacaaaacaaacaaacagttctttgtaaaaggctcttggttttctgggcttaaaggccagactgattctgcctaagtttccttggatacctgttgcggatatccctgtggctaattatatttgatgttaattccattctcctgtgaggggctgtgaacaaggaatgagtcagcactgaggtgatttcctgtgaaccttcttcccaccttaatttataaataaaggctagagctggtgattgggcagaggggaaggtggagctgaaggatttgagagagaggggggtggagaaagacagagaaacagagagagagagagagagagacagagagagacagagagacagagacagagagacagagagaaagaagatgatggaggaagaggaagaagggaagaggagcagaagcacctagcctggaggaaactgcaagttattaggggtctctgatactgggatgatggtagtgtagtggtagatctgcccaatctcacagcatgtattcatattaactgagctgtgttttcattgcctgggcttatttgggttagagaattactgcaacagataccacagagaagtgtttagccagtggactatagatgaactctgtcattttaaaattattatgtgcctgctagattaaaatttcttacccagatttctgactacattgacagctaaggaaactgtaccttgacagctaaaaaacagacctagctccttaccctatggtaatccaccactatatttactcattagtaaattcgttagttagctaagactgccagatttcttatagacatcacgataaacgatacacaagttcagatataagctttaatagatgtaatgtattgctttttttttaacctaaaatcagtttccattgactaaatacttcatatttcctcttcttgctatgtcattgtcctaacactaatcaagagagttctttttttttgttttttgttttttcagacagaatttggtaaactgaaatatgtacatgtaatcaggatttcaatgggcaactgccttaacttcaggaaaggctgactctgtgattacacatttgttagaagttatagccattatgagaatactcatagaaactaaacctgacaatgtctggcataggtcactaataagataaagcagtttttattacatattataatataaaacacattccaggcctaccacataatcctaccggacaagcgattgtggagagatttaattgaactataaacaagatgcttaacaggcaaaggggtgggggggaataaaaaacccagagatagattacatagtgctttattaactttgaaatttttaaattctagtgaacaacaaaactatggctgcagaaggacattgggttgtggaaaaaaactgctgaactaaacaagcctatttattttaagcatattctgcattcaaaatggaaacaggaaatgtgttacagtactggaggtgttacacctatatttccacaggaagagaaaagctgtgggttccttccaaatggataaaaatcagatatgaccaagggagagccctgaagagctttgctgcagacaagaaggagactaacaagattaacaaaataggtgatgtatatgtggtgatgtatatatgtctctgtacacagagacagagctggaacctgctgagacctacatgtctatatccagccaataacacttattgagtacaaaattctcattacctgttattacatacactctataagatggcgtgaatggaaaattggattgtagtttgattttatgcgattaaactaatctatgaagaaagacagttgtcttcctttattgatctttactaacaaatctgtgaatcacgcaggctgcattcgaatgtttttacagagttatgcgttgcttgtgaggtttgtgtgttgcagaataatagaggagaaagatagctctgacaagactcacactctgggatgttgaaattctggggctttctattccagctccttatttgtttctatctcaattacattgaagatgtttcctctaaagacttgcttccaggatatttccagaacagctagctctcccatccagcctttcagactgttatagtcaggatatcaactaagccatgaactttcttagcacatagagactagaaggcaaatgatgccaactagccttcctgtgacaaaaccaattttcctatttccctttgggcacccagaagggaattctttaccccaattcagctaaaagaaagcaaaagaagattgttgtcccagtcctttaggttggggtggatggttctggttattttatgaattggagatatgttgtcattttaagggataatttgctaatgttgtagctttggacagggaggaaactagagagcttagactcagggatttctacctttcctttcctcttatctatccttccgtcttaggtaaagtaaagaggagtagaagagaaaaagccagatatagtagtatcatagaaattaaaggagtaggcaaatagggatatgtaatcaaatttagtcttagacaaaacaacgaatagccacatcttacattggttgaagtttttgtaattgatgcaaattaaagttatacatttacattggtacacaatttatagattgatatagatctaaggttttctttattgtgaattttttatattgatgcaaagtttgaaattaatgtgcttactctctgacaggcattgtgtctatgcaacttatgtcgactataatgcttagatgcagtccttctaataactgacattacaaactgcctaggatgattgagtaatgcaagttaaaggccaaatagtaaactcatagttacattatattctgatttgattatgagttactcaattagaaatgactaagaatagttaggatttaacagttcagctgtacttgacatagatagtcttcaaaagcatcagaagtccacagaatatgacatttaaggccatttcattattaaagatcatttgagtagagacatgtcttctcctgacaatagccccttcttcgttcaaagaagaaattgagcatcagtggggtttctccagttgtggccagatagactctggtaagatttgccccaattcatctatagacaaaaatactgtccaggaaaaggacacactatgtggaatttttgactgataacactgtcaagacagggtaagcagttctttataattctgctttacaaaggtctgtcagataatcctggccagaaggctgaagactgatgctataacattttgaggaatgagtgacggtccaggttagttagctgtctctacaaattggttaagttttggaagttattttttgtgatgtttaatttgttcatggattcttctgggggttgaagataagttatagtttcatagtacaggcaagttgttttgtattgagatagatgatatagatttgagaggatggttttcagatggtgaaagaagctaaaaccagaacacaattcaggtagagatttgcaagttctttaagttaggattggtggtagagtgctttatctaaattgacacatatgatggcctgggtgttaagtgtatcttatacttcataatttgcatgactgggatgattgagatcaatttatacctgagagaaaaaagtcttttaattggacaaaaacgaggaatgttgtgggttgccctggggcagtttgtactctgatgttaattctgctttcttaagaggggctaccttgaaaatgagtggatcacatactcaagtgatttcatgtgaccattctccccattttaacttgtaaaataaaggctaaagcctatgattgggcagtggaagggaaatgtgaggctggggcttttagagagtagaggaagaaggatggaggagaggcggttggaggaagatgaatcagaaccacatggcttggagaagccgctggtacaaggaatctcatagctgggaacaaattaatgtagctctgtatctacccaatctagccacacaccttataaatattgtaactgagttgtgtgggttttgcacaggcttattggggtagagatttattgcaacacaagaacacatcaaaaggatcattcaacacgaccaagtaggctttatcccatggatgcagggatggttcaatattccgaaatccaacaacataatccactatataaacaaactcaaaaaatatcatataatcatctgattagatgctgaaaaagcctttggcaaaatacaacaccccttcatgttaaaattattggaaagatcacgaattaaaggcacacacctaaacatcataaaagcattatacagcagaacaatggtcaacatcaggttaaatgtagagaaacatgaagcaatctcaattataatcagggacaagacaaggctgctcactctctccacatctattcaatacagcagttgaagttttagctagagcaattagacaacaaaaggatgtcaaagggttacaaatgagaaaggaagaagtcaaggtatcgctatttgctgatgatatgatagtatgcatagttgatcaccaaaattctaacagagaactcctacatctgataaacaacttcagctaagtgtctgaaataaaattaactcagacaaatcaatattcttcctctacagaatggataatctgttttttttctttctttctttttttggttttttggacagggtttctctttatagtcctggctgtcatggaactcatggtgtagaccagggtagactcgaactcagaaatctgcctccctctgcctcccgtgtgctgggatttaaggcttccaccaccatgcacagctaaaagtaagcattttcaacaaatggtcatggtctgtatgtagaggaattcaaattgatccatttttatnnnnnnnnnnnnnnnnnnnncataaaagcattatacagcagaacaatggtcaacatcaggttaaatgtagagaaacatgaagcaatctcaattataatcagggacaagacaaggctgctcactctctccacatctattcaatacagcagttgaagttttagctagagcaattagacaacaaaaggatgtcaaagggttacaaatgagaaaggaagaagtcaaggtatcgctatttgctgatgatatgatagtatgcatagttgatcaccaaaattctaacagagaactcctacatctgataaacaacttcagctaagtgtctgaaataaaattaactcagacaaatcaatattcttcctctacagaatggataatctgttttttttctttctttctttttttggttttttggacagggtttctctttatagtcctggctgtcatggaactcatggtgtagaccagggtagactcgaactcagaaatctgcctccctctgcctcccgtgtgctgggatttaaggcttccaccaccatgcacagctaaaagtaagcattttcaacaaatggtcatggtctgtatgtagaggaattcaaattgatccatttttatctccttgtacaaagctgaagtctaagcagatcaaggactgtggagagccggtacatgctgcgagcaatcgcatgcgtgctgccagtaatctctgaggagagccgtgtgtgccgcgagcaatcgccattataagatggcgcgggcctccgctgtgcctaactagtaaacaagtcctgtacgcaggtgcaagagtgaattcactcctagtcactcccattctcggggtgtaatagtggggtgatgggcaagcaacgaatcgggagctgtcacgccatatcaggtgctgaaacgtcacgctgcgggttataaaagcagtgccattttcccggtttgggatcttcctgagaagcaagcaataaagcttttgccgcggaagattctggtttgttgcgtctttcttgccggtcgagcgggacgcaataagtggcgccgaagaacccgggaactgtcatcacaccggcgcaagggaagatccctcgttcgcggggcagaatcagaaccgtgggacaaaaggctctacaaggtacgtacaatcttgaaatttctccagagttagaagcccttttggattgtttgnnnnnnnnnnnnnnnnnnnnatggaaaagtccggggaaggactgaaggagctgaagagtattgcaaccccttaggaagaacaacagactcaaacaactggatccccaagagctcctagggactaaacaaacaaccaaagagtatacatggatgggtccatgattccagctaatttgtagcagaagagtgagtgattcatcatgtgtcagtgggagtggaggcacttggtcctgtggcagcttgatgcctcagagaagaggaatgctagaggggcaaggaaggagtgggtatgtgggtggggagagaaccctcttataggcaaaggagaggtggaatgaggtgagaggttcatggagggggagatcaaaaaggggaacaacatttgaaatgtaaataaataaagtaattaataataaaaaaagaaattgttgacaacagtaaagttttggtgaggcaaaaagaaaggagtcaggcaaagtagagaaaggttgagtatggctagtgatcttctgaaatgaatagagttgtatttgagatgcccccacccccaaccccccatcccctgtttatatagaaccagcgtccaaaggcacagctgaatggtagacttcacacttctcacgtacaagtttgatctgaatttgatccctagcaccacacacaataaaagtgccttccacaaaaaaaaaaaaaaaagcatttttgtacctgcgaaatctaaaacatttctcagctctgtttctttcctttgcagtctagcatgtattcctgacttctctaatcccttcccagtgttttagttctaagggagggtgtggtctgacctacttagaaggtaggcacccaatcactggcagcttaccaagttagctgatttgaaaatctgaccacaagctcacacgctgtccgaaaagtttgttcattcatcagaagctcattgcttcagcaagaagatagtggtgcagagcctcccatgccagattgcttggaaacaggagaaaaactctaagtatttaatgaaatgctaactaaactaaagtgggggaggcttcctcaggggagctggatcttgctcctgttagcctgccacagtgggtctctatagatatgctgaggctagggtggggtggagggtagtatgggaggctgccctcacattcgccattgcaagatggcgctgacatcctgtgttctaagtggtaaacaaataatctgcgcatgtgccaagggtagttctccaccccatgtgctctgccttccccttgacgacaactcggcctatgggctgcagccaatcagggagtgacacgtcctaggcggaggataattctccttaaaaggggacgggttttcgccattctctctcttgcactcttgcgctctggctcctaaagatgtaagcaatagagctcttgctctctggctcctgaagatgtaaggaatcttttgccacagaagattccggtttgttgcgtctttcctggccggtcgcgaacgcgtgtaagagggtaggagctctgctgtggtaggaaagtaatcatgccactctgtgctttctggtatggcctgtgttacttaaatgtgttgggggaaagtgcaaccaacagagaatttgttagtacctctttccagggtttctccagtttggactccactaacttacagaaagtgctataaacaaatggctcccaacatgcctagaggctgggatttactgtgctcaattgctgtaagtaaactgtagcagaagtgggtgttgttggtgtcaagtttgaacaaggccccgtgccatcacccccaccaccagcagatttagagataccctcagatactcctttggggaaatgtctgtgtgtctcccattgacttgagggcctgcactcacacttgatcctgagatccctgctactgcagaaggatgtggtccttttgagtttgtaaatcaaagcaggtgcccagattcctggagggttgactagaggaccttgggcttgctctggcacaccttgccacccagcccacacctaaagtgcccctcctccacacctccctacaactttcctttcaggctcccataacacatggtgcactcccccttccccaaacctccaagctctcagaatttctctcttcctgaggacactggtatcaggcaatatactctttctggccttaaatgactcttgtggcatcagggaaggatcaggtgttttccagtagggtgggggtgggagatttatcccatccacaaatccatctacagttttagttcactgggtgctgggaatgaaccaagccctctctctctgcaagagcagcaagctcccttccctgttgagccataactttacccccactttaatacttttgtttaggaataaaatatcaaatttcttgaaaagcagagttcacaattgttgttagatcacgggcctagtggaagcctagggaaaccagacaagctccttcttaatggacagcttagctgctatgatgattggaaacaatgttctgggaggtgggggacaggccgaggaagagggagatctaaccatgcctcccttcaaccctagggccctactccatgccatcctgtgcacacctaaagtacccccctccacagctatcctggtcccttaaacagacccttaaacagagtgtagaatggggtctccttgaggtgtgatctgcttgctgcctctgactgtgaggttccaccaggttccaccaagtcccatagtcctcacagtaagccatagcgcctgctgtgttgggaaaacttagaaaagtaaagatttcctttgttcttcagacttttctatgggttaaaaatggtagccaggtcctcacagcacaggccaagggacataaagcaactgaatttggtgacagttactgtatctaatgttttcacctcctctgactgatacccaaagagaaaggtcatgagtaatactactgtttctcagataagccatgtgcttctgagggcaagtagtctagatgaacactagagcgccttaagagagtccatgactgagcaataagatggtgagggtctaaaatnnnnnnnnnnnnnnnnnnnnnnnnnnnnnnnnnnnnnnnnnnnngatggtgaggttctaaaatggcgacttttttcatcaccttccggacctgagaacaaatcttggctacttaaaacaggcctgtgcagccttttctcctctcattggtgcccctgccagtgagcaaatccaaatagttcaaggccagagcaggatgtggtttttgattgacacagtaagatgaacgaacttgctctttgtttcattatggtgaatatattcaaaatcacttgggctagctttagaaatatggtaccttgttgtgagcagtattcatcctactgtgtctttgaacaccaaatttgataccactttgaagaaattaatatctgttctgtctctacttccctccagcctctggcaagagatatttttacttgcttgtgtgttcacaatagccagcacatggaacacactaacaggcttctctgctgactgaataagccaatttgagctgaattaaaagtagaaaagcctatttgtttcagaacagttccagggcaagttcactggtctcaggggacaagacggaagtcctgtaggctatggcagagaaggcttttatagattgttggtgaaggaaaatgacctgcctgccacaagctgggcttgagccccagtgtggtcacctaggctggggacaaaggttgctacagctatcatgaatgcggaactggacttttggtgccagggctggggttgtgggaggtacgcagtgtgcgccaagtcaaaggctccaaccaaacagacatcagcatctatcagtggatgagtgtggaaaaactgtgatacttactcccatatatactggaatactatgcactagtaagataggatgtcttttgtgacaacatgggtggatctgggtgacatgctgagacaaattagtcaggcactgaaaggcaacattgttcatcagttgtagaggggtttgtcagctaaaagcagacaggagtttccactcttttcttggattggaaagatttttgaaatcacagtgcagaactagaaatcacaatgaaaccaaaccactccaatatgaaggggtttagaaatctcccaagatttactttctataggagtgtgaggagggctgaggagtgctcccaggggaagctcgattgctcacagcaacacatggctgagaggtgctgaggctcgaaatgagcacagtagaatttattatactatctttttatattctgtagaactagaaagaatgaagccagggagttctgtgtggatccaaaggaaacagttcagtgccttaaagctttctttctaatcctaaggattcttttcctgcttgttaatgtaatagaagcttcctggtatgttaggtgtgtgaaaatgagtgaaatgaaagggttaaagtcagtgaaaactctgtaaaaagtataatttacatccagtaaaattaattcaattctgtgaattttgaaaactatataatcttgcattcttcatcatgatatataggggctgaagatttggctcaaccattgagagcatttatnnnnnnnnnnnnnnnnnnnncttatctatgtttcgacaaaagagagattttggcattactgctgccgtgatcatagcaatttcagccagtgcagctgctgctacagctgcagggtacgctatggttagtgcggttcaatcaggcacaaaattaaatcagctttcagcagatctggctgatgccatcactgtccaaacttctgctagtaccaatttaaagggagggctgatgattttgaatcagcaccttgacctggcggaggaacagataggtgttctataccagatggcccagttgggttgtgaaagaaaactggaagctctgtgcattaccagtgtccaatatgaaaattttacttatgcagctaatctgtctagacagctttctttatatcttgcaggaaactggtctgaaagattcgatgagacccttgagcccctgagagcggccgttctaaagatcaactcgacacgagtggacctgtcattgacagagggcctctcctcctggatttcatctgccttttcttattttaaggaatgggtgggagtaggtttatttggcgttgccacctgctgtggacttgtggtcatgctctggttggtttgcaagctcagaacccaacaaacacgtgacaaggttgtgataactcaagcacttgctgccatcgagcaaggggcctcccctgaaatctggctatctatgctcaaaaattaattgacattggtggctggcctcttttatagagttcgccctaggtcatttagtaattaatgtcacaatgcactgcggtatccagggacgggcaactttcctcatgcacagatcaacctaagacacggggcccggtggcgatagggttaccctatgacaggaaaggctgtgacattggaggaacgacctaagacaggagccacagcggatgggcataattacacaggcctagaccagcctcaaattttaataaaataaaaagggggatatgtggagagccggtacatgctgcgagcaatcgcatgcgtgctgccagtaatctctgaggagagccgtnnnnnnnnnnnnnnnnnnnnattaagcaacccagtgaaaaaatggggtacagagctaaacaaagaattatcaactgaggaatcttgaatggctgagaattacctacaaaaatgttcaacatccttagttatcatggcaatgtaaatcaaaagaacactgagattctacttcataccagccaaaatggttaagataaaacaactcaggtgactgcagttgctggtgaggaagtgagaaagaggaactctcctccattgcttgtgggactgcaagctggtgcaaccattttggaaatcaatctgccagctactcagaaaattggaaataagtattcctgaataactagctacacaactcctggtcatatatccaagagatgctccattatcccacaaagacatttgctgagctatgttcataatagccttttttataataatcaaaagctggaaacaatgcagatctccctcaatggaagaatgaatacagaagatatgttacatttacacaatggaatactattcagttattaaaaacaagggctacatgaattttgcagcaaatggatagacctagaaaatatcccaagtgaggtaacccagacccaaaaggatatacatcatctctactccctgataagtgattatttgcccaaaagctcagaatacccatgatacaagtcagagaccatacgaagattaacaagaaggaggccaaagtgtggaaggttcaatctcacttaggaggggaaaaaaataatcatgtgaggtagagacagaaagggacctgggtgttagaggggagagaaacggaaaaagggggtggtcaggatcaagtgtgagaagagacaggagagaagtccaaaggactggcagaaggaatagaaatatgtggcacagggggtggggttggggaatggagggaggaggagaaaccactagaaagtgccagatccagggatgcaaggggctcctaggacccaatgggtatggcattaactgaaatgcccaacagtggggaggtagaacctgtagagaccacctccagtagatagatatggaccccccagttgagggatggggccactcaccctcaaaaattttaacccagaattgttcctatctaaaggaaatgcagagtcaaaaaatggagcagagactgaaggaaaggccacctagagaatgcccccccccccaacttagaatttattccatctgcagacaccaaatccctactatattactgatgttaaaatgtgcttgcagacaggagcctggtaaggctgtcctctgagaggctctgctagaacctgactaagacagatgcagatactcacagtcaacttttggactgagcccagagaccaagatggaagagtcagaggaaggactgaaggagctgaagagtattgcaaccccttaggaagaacaacagtaacaaacaactggattccccaagagctcctagggactaaacagacaaccaaagagtatacatggatgggtccatgattccagctacatttgtagcagaggagttcttcatcatgtgtcagtgggagtggaggcacttggtcctgtggcggcttgatgcctcagagaaggggaatgctagaggggcaaggaaggagtgcatatgtgggtggaagagaaccctcttataggcaaagggaaggtggaatgaggtgagaggttcatggaggggagatcaaaaaagggaacaacatttgaaatgtaaataaatgaagtaataaataataaaaaaagaaattgttgataacagtaaagttttggtgaggcaaaaagaaagaaaggagtcaggcaaagtagagaaaggttgagtatggctagtgatcttctgaaatgaatagagttgtatttgagatgcccccccaaccccccacccctgtttatatagaaccggagtccaaaggcacaactggatggtagacttcacacttctcatgtacaagtttgatctgaatttgatccctagcaccacacacaataaaagtgacttccacaaaaaaaaaaaaaaataaaaaaaaaaaaataaaagcatttttgtaccctcgaaatctaaaacatttctcagctctgtttctttcctttacagtctagcatgcattcctgtcttctctaatcccttcccagttttttagttctgggggagggtgtggtctgacctacttaggaggtaggtacccaatcactggcagtttatcaagttagctgatttgaaaatctgaccacaagctcacacgctgtccgaaaaatttgttcattcatcagaggttcattgcttcagcaagaagatagtggtgcagagcctcccatgccagattgcttgaaaacaggagaaaaaccgtatgtatttaatgaaatgctaactaaactaaagtaggggagtcttcctcaggggagctggatcttgctcctgttacctgccacagtgggtctctatagatcagcagaggctggggtggggtggagggttggagctctgctgtagtaggaaagtaaggatgccactctgtgctttctggtatggcctgtgttatttaaatgtgttggggtaaagtgcaaccaacagagaacttgttagtacctctttccagggtatctcgagtttgcactccactaacttacagaaagtgctataaacaaatggctcccaacatgcctagaggctgggatttactgtgctcaattgctgtaagtaaactgtagcagcagtgggtgttgttggtgtcaagtttgaacaaggcctggtgccatcacccccacccccagcagttttagagataccctcagatactcctttggggaaatgtctgtgtgtctcctattgacttgagggcctgcactcacacttgatcctgagatccctgctaccgcagaaggacatggtccttttgagtttgtaaatcaaagcaggtgcccagattcctggagggttgaccagaggaccttggcatgatctggcacaccctgccacccagcccacacctaaagtgcccctcctccacacctccctacaactttcctttcaggctcccacagcacatggtgcactcccccttccccaaacctccaagctctaggaatttctctctcttcctgaggacactggtatcaggcaatactctttctggccttaaatgactcttgtagcatcagggaaggatcaggttttttccagtagggtgggggtgggagatttatcccatccacaaatccatctacagttttagttcactgggtgctgggaatgaaccaagccctctctctctgcaagagtagcaagctcccttccctgttgagccatgactttacccccacgttaatacttttgtttaggaataaaatatcaaatttcttgaaaagcagannnnnnnnnnnnnnnnnnnnnnnnnnnnnnnnnnnnnnnnnnnnnnnnnnnnnnnnnnnnnnnnnnnnnnnnnnnnnnnnnnnnnnnnnnnnnnnnnnnnnnnnnnnnnnnnnnnnnnnnnnnnnnnnnnnnnnnnnnnnnnnnnnnnnnnnnnnnnnnnnnnnnnnnnnnnnnnnnnnnnnnnnnnnnnnnnnnnnnnnnnnnnnnnnnnnnnnnnnnnnnnnnnnnnnnnnnnnnnnnnnnnnnnnnnnnnnnnnnnnnnnnnnnnnnnnnnnnnnnnnnnnnnnnnnnnnnnnnnnnnnnnnnnnnnnnnnnnnnnnnnnnnnnnnnnnnnnnnnnnnnnnnnnnnnnnnnnnnnnnnnnnnnnnnnnnnnnnnnnnnnnnnnnnnnnnnnnnnnnnnnnnnnnnnnnnnnnnnnnnnnnnnnnnnnnnnnnnnnnnnnnnnnnnnnnnnnnnnnnnnnnnnnnnnnnnnnnnnnnnnnnnnnnnnnnnnnnnnnnnnnnnnnnnnnnnnnnnnnnnnnnnnnnnnnnnnnnnnnnnnnnnnnnnnnnnnnnnnnnngccaagggacataaagcaactgaatttggtgaaagtttctgtatctaatgttttcacctcctctgactgatacccaaagagaaaggtcatgagtaatactactgtttctcaggtaagccaggtgcttctgagggcaagtagtctagatgaacactagagggccttaagaaagtccatgactgagcaataagatggtgaggttctaaaatggcgacttttttcatcaccttccggacctgagaacaaatcttggctacttaaaacaggtctgtgcagccttttctcctctcattggtgcccctgccagtgagcaaatccaaacagttcaaggccagagcaggatgtggtttttgattgacacagtaagatgaacgatcatgttctttgtttcattatggtgaatatattcaaaatcccttgggttatcttaagaaatatggtaccttgttgtgagcagtattcatcctactgtgtctttgaacaccaaatttgataccactttgaataaattattgtctgttctgtctctacttccctccagcctctggtaagagatatttttacttgcttgtgtgtttacaatagccagcacatggaacacactaataggcttctctgctgacttaataagccaatttgagctgaattaaaagtagaaaagcatatttatttcagaacagttccagggcaagttcactggtctcaggggacaagacggaagtcctccaggctatggcagagaaggcttttatagattgtcggtgaaggaaaatgacctgtcagccacaagctgggcttgagccccagtgtggttacctaggctggggacaaggttgctacagctaccatgaatgtggaactgggcttttggtgccagggctggggtggtgggaagtgcgtggtatgggtcaagtcaaaggctccaaccaaacgtacatcagcatttatcagtgagtgagtgtggaaaaattgtgatacatactcccatatatactggaatactatgcactagtaagataggatgtcttttgtgacatttttatcctattttgtgtgtggacctgggtgacatgctgagacaaattagtcaggcactgaaagcccaacattgttcatcagttgtagaggggtttgtcagctaaaagcagacaggagtttacactcttttcttggatttggaaagatttttgaaatcacagtgcagaactagaaatcacaatgaaaccaaaccactcctttataatatgaaggggtttagaaatctcccaagacttcctttctatagggagtgtgaggagggctgaagagtactcccaggagaaacttcattgctcacagcaacacatggctgagaggtgctgaggctggaaatgagcacagtagaatttattatactatttttttatattctgtagaactagaaagaatgaaggctgggagttctgtgtggatccaaaggaaacagttcagtgccttaaagctttctttctaatcctaaggatccttttcctgcttgttaatgtaatagaagcttcctggtattttacgtatgtgaaaatgagtgaaatgcaagggttaaagtcagtagaaactctgtaaaaagtataatttacatccagtaaaattaattcatttctgtgaattttgaaaactatataatcttgcattcttcatcatgatatataggggctgaagatttggctcaaccattgagagcatttattgctcttgcagaggactggggtttcattccaagcacccatatggtggctcacacacccacccctaattccaattccagggatccaatatacttttctaagctcttctaatactaatcatgcctgtagtatacatacatacatacatacattnnnnnnnnnnnnnnnnnnnncaatgaaaccaaaccactcctttataatatgaaggggtttagaaatctcccaagtacttcctttctatagggagtgtgaggagggctgaagagtactcccaggtagtaaacttcattgctcacagcaacacatggctgagaggtgctgaggctggaaatgagcacagtagaatttattatactatttttttatattctgtagaactagaaagaatgaaggctgggagttctgtgtggatccaaaggaaacagttcagtgccttaaagctttctttctaatcctaaggatccttttcctgcttgttaatgtaatagaagcttcctggtattttacgtatgtgaaaatgagtgaaatgcaagggttaaagtcagtagaaactctgtaaaaagtataatttacatccagtaaaattaattcatttctgtgaattttgaaaactatataatcttgcattcttcatcatgatatataggggctgaagatttggctcaaccattgagagcatttattgctcttgcagaggactggggtttcattccaagcacccatatggtggctcacacacccacccctaattccaattccagggatccaatatacttttctaagctcttctaatactaatcatgcctgtagtatacatacatacatacatacattctagcatacaggacaacaaagcactgttacatgtaagataaataagactgaaacagtcattttaaaagtatatacacatcgcttctcagccttttggctaagtcaagtgtaaaagtatatacagaccccataccctatctcagtttccccattgtctgctgcagactctccctgctcctctacctcagctgtgagtactcacctttccagatgccataaaatgtgtccatgaagcagagaggtcccacctgagttctttcagcttgtcacagcaatgccctctgctcatcactcacactgcagtgcttatcagtagcatgtcagaaacaagcagtgctggagagatgctgagagaccatgtctacagcactgctgtcagaacaatgctctgagttcagaattttgcatgaatctcaccagcaaatattatacaaagatgttgtgaaaggctgtcaggaaacttctggagaagtgagaggaggagtttagtagtggcagttgggtgtctcctcttagaggaaactgccactccctgtagttctctgacctagtttgcataagcttactggcaggcttagtttagggactttttgggtaagaagcccttgggatattttgcctgttaaagtggcatgagatagggcaagcccaggcttgtgttctgagttgtttcttgtgttgagagaaggtttaccttgtcatcagcttggggaaatttcaatggtcacaaatgtgtcattttcacagggatccttatattcacataaagatatcgtgccacttaaatgcaggctgtcctttccagcatggggatatgtgggtggatgggagcatatcatattttatacttacaaacagttttgtagtagctgtacaatttagccttaaaaaggcgtgttagttctacatcaacattgatatccacatcaatgtataaccatcctgttgtgcagacagtgattttgctcttaaatctaagatgattttgcccaagacaagttcacaaacattctcccttatttttctaaatatcaaatgtctatgatattaagttttgtgcttgggtctatatgtctacaaatggactgtagtagtttgtgtttattttattttatttcattttttaaataaaaatacatctttatgtgtaaaaaaaaaaaaaaaaaaaaccaaaatccaagacctaccagttttccattataaaaatccataaaaagaatcgtatgaattaagaggctgcaattnnnnnnnnnnnnnnnnnnnncataaagatatcgtgccacttaaaatgcaggctgtcctttccagcatggggatatgtgggtggatgggagcatatcatattttatacttacaaacagttttgtagtagctgtacaatttagccttaaaaaggcgtgttagttctacatcaacattgatatccacatcaatgtataaccatcctgttgtgcagacagtgattttgctcttaaatctaagatgattttgcccaagacaagttcacaaacattctcccttatttttctaaatatcaaatgtctatgatattaagttttgtgcttgggtctatatgtctacaaatggactgtagtagtttgtgtttattttattttatttcattttttaaataaaaatacatctttatgtgtaaaaaaaaaaaaaaaaaaaaccaaaatccaagacctaccagttttccattataaaaatccataaaaagaatcgtatgaattaagaggctgcaattgcaaggtgaaaggctgaaaaggctgaaagaagattaaaactgtacaaattctttttaaactaagtggaacctaaattaagtaaacactgttagtctctgctatgtaacgtggctatacaattcagcaagcaaccacaaaattctttccttctctttttctacttctctgacccagagctttttctatgtactcagactgatcttaaacttttgatctccctgccttggcctccagagtcctgagattacagaccattatgctgagctccaatcaggactcatctgaaaatgaaaagatagtgatatttactttagaacaacaacaacaacaacaaaaaacccaaaaccataaaattaaaagaaccaggcacagtggtgaacacacacctgtagtcccagctactcttggggctgaggaagaagccatctgagcccaagtggttgaggccagccctggcaacagctattcctttaccccactccccaccaaaaggagacatatctgtgacatgtgtcccatagagaaggtagtgtgggacactgttttccctggtgtgccttgcttcctcaaagtcaaggctgattttcacaagcaccctgtgacatgtggttagcactctaaagaagtaaacagttatggttcatgacattgtgttccattccttctaccctcccctaccccactactggagaccttacctagtggtttatgcatgctaggtaagtgttctagcactggactttaccccggccctctttttatgttaggacagggtcttactggcctagaattaaggctgtagtccaggcagacttatgtctataacctgtttcagcctcccaagtatctgggattacaggtctgagtcacctgcctgacctagaggtgggtttaacatgacagctctcctcttccatgagacacttaaccacacagtgaccaaaatagctgagatgaaatttcaatgggtattaagcctctagccaagcccctctccccagtgattctagcatgtgtctccctgggattgctaattttctggaggattctgggccaggtgctgttcccattcaacttcaaccaacttgtacaggtccattgtggcctggtcatcttctaccaaggaatgtccactatttccaacctggatgtcccgactcagcagcttcttggtgagatgtttcagtgacaaagtgacattttctgggcagtcatccttccggtggaggagtggtatctggaaagtgtctcgggtgagggacttgggatgaaagtactgtagggctttgtagtcattgtgagcggcatgccctaccactaccttccctgagagtatcttcaagatctcactctgagcagtcttaaagggtgtagcgttaaccatgcggcacttaaggatgccactccatctggtctggtcgtccacgatgtagcaaaggggtgtgaggatgggggaggacgtactcatcatacagcacatcgccattgtaattcacaatgctgcatccagccagggaactaaggcaccccttaggtcttgtgcccaccatttcacagtctattgccaccatcttccctggcaagttttggggtactgtagggcacttatcttcagaacgagcttgggtggagttctgtacagcatttttcttcaagggcttcttcttggagcctttatcctttgactgagcttgggtggagttctctgtagcaattttctttttcaagggcttcttcttggagctcttagtctttggaagggcactctgaagctcccctagcaaatctattttagtcacaacagaagcagtcttctttgaaggagcaggggtcagccaagacaatggtgctttcttgtctttggactgctctgagtccctcttggaggcaactgtgtctttcttcttctttgggcatggaaggatcttcaaaatgccatctactcttgaagtttcccctttctttggaggttctgaattcaacttagacaccttgctaggggattggttctttttattcagaaataatttcttttccaagaaacgttgcttcttgacaaaatgttgatgtttggcatttcctccaaatgtctttttcgaaggttgcccaaagtctaaattcaggagtatggtagacatgagatcagtggatggtgggagaaagctgggaagaatggctcactgatggcaaaaggatgagaggctcattctctgtggaattccataattcaacatatggaggtttgcaattagccttggggacaaaagtaatcctgatacccgcaacataggcctccaagttgggtccccactaagatcgcaagcatccggagcaggaatgcgggtgacaacgggagggcagctagcgagggcccacagagcccccacctcaggcagcaaggccagcaattcagagtgcatgagcatcaggaatgatggtggcggcatgggtgggggctggatgagctccacggcccctcgggcccatggaagtctattttattttttagcagacagatagaaggttgtttcagtagcacacactggagtgatgccaccttttccctgtctaaagactgttcatctctgttaagtgtctgttgaccacccacgtgtgtttgacctcattgtggagtcctattttctgctgtgttgtttcagtgtctactctgatgctagcaccaggctttcattcctgttcctgtaagaacatgagacatcaggtcaggccttgtgatctttctgattttgacctcttcattctcagaataatttttgactattaatttttgactctttaattttcatattacttctcatacaacttggtgctatgatttttttttttctgaaggcaacctcccctctggaacatgttgcacatatatgtgtgttcaggaattgttgatatgagcaatatggagtgttctagttcattatgtgtttagagctgccttgatttcttttttttttttttatttcaagaatgtaatatgtgtgagtgtttggcctgcatagacatctatggatcatgtgcattcctagtgcccaccaaggtcaggaaagttcttagagttcctgaaactggaattacagaggcttgtgagctcttatatcggtgctaaatttgaacccaggtggttggaaagatcaacaagtgctcttaaccactgagccaactttcctatatttatttgtttataaatttacatgtagtttttgttatgctgactatgaacatcctatttttagatttgtaattttatggtttatttggcattactgtaaagagcactgtctaagatattaatttccacttgacaggaaaatataactgattttaccatggtgatgccctgtcctgcaacttcataaactcatctttttttacatccagtattcttttatagatttgttagaatttttatgtagatagaaccatgtcatctgtgaagagaaacactttcgcctgtttctgagaaatgtaaacttcctttcgttctttaagaaacttatttatgtacctgactgtttgcctgcaggtttgtgtatcacatgaatgcacagtgcctaaagaagccagaagaaggcgaaggctcccccggaactggaggtgtgcaatgttgtaagctaccttcaattcaagtcctctggaagagctgaaagagatcttaacagctgagccattctccagatacctgaccctatttctttgtcctggcgagcacctcctgggaaaagtctacctggagtaatgagcagacatctgactcttgctcctgattgctgggaacacattcataatggcaccattgagagtgcagctgactgaagttggacttactgttttgtttttagtggatgacttttgtagggttgaagaagttcctttcgcttccattttcacataattttgctgtttattgagatatttctagtttttcctcttttcttattttgttattatgtctaattacatcaacttattttctagtgtttccataactccttctagccagagcgctttttatggagccaaatccagatttttgttgtttgcatttcactgggatccccactccctccatttttgcgcttccattattcaccctgagttcagtgaccagaaggctccctggcagaagttctgtttccatcctctctatacttctttctaccatggacatcctttgtggaccagggccttctctaaaagggttggcagaagcctttcaggaactgataggcaattgtcaagtgggttttgtggttattttattttattttatttaagaaattcttgaaattcgcattcttatattcatattttacagataaaattctccaaagaaaaagtctcagagccatctcccctgagtcttctgctaagctttactgctgctatggagtgatcatggtcctcactgtagctgtagttgctctttctgttgctttgtcaggtaagtgacataccctccaaattctgtgacactctgtccatattcacattgccagttatgctttctaagcactgtgatccaggcactgtggcaagggctctagaggaaacacactggaaggtcctgttctctgagaatttaggttccaacaggaagatgcagtgaaggaacacagaggctttgatggggacatccccgggaagatgacatccagcaagctctagacagagatgcaggggacataggtccccttgggggaacaattcaaggcagagaataacaagagggaatctccaagtagaaacttcaaaggtgaggccaggaaggtacagtgcctttgaccatgacccatgagtttagataccaggctcaactctattttgaaagtattaaatggaaagttcctgaagtaagaaatttataggattttagtaccacaatattcagaatagtgcaatacaatcttgcactgtcctcttaagtatttgaagtcatcctttagtgcaaggtgtctgcaccgtatatacgacctacccaaaaattctcatagaaatctcaattatcaggctgggtgtcagtaggtgtccctacagagtgcttgctgctgtagcaatccccactgtagtcaatggtcatccaaagctcagaaagtgatgctgttatagaagtgcactccctgggagccctactgacagtgagcacctgagagagaatgggacacaggcccacggtgggaggcctttagttaaaggcacatctcgatcaggagaggattcctacagatcagttaggaaagctaccatcagattcacacctcacagctgagctcaggagagtgtggcaaaacgagagaagacctgcttgctatgatccatcatattctctacattttagtaacaaagacagaacagatcctaatcaacaagacctatgctgcttgcccgaaaaactggattggagttggaaataaatgtttttatttttctgaatacacaagtaactggacatttgcccagaccttctgcatggcacaagaggcccaactagctcggtttgacaacgagaaggagctggtaagcaatgggcagggattggtttgtctgtctgttctgttgaatattatattgccttgagatagagagttacagatgaggcccgaggaaggatcccacccaagcacatggagacatagggaatgtgagtgtgtgccatttgctgatgcttgacttctgactggagccctgagatagtcaagaaacattctctcatgaagtgctcatagtcagctggaaggtcaaatatgccattttactgggatacctggtgaccatgagtgttttcccatatgctggcatatgttgggtacagaaggagacaactgataataactgcagtggaaggttaacccagaactgtccaaaccacagaggaatgtgaccctcagttacatcctcctgttatctctagagaaaggtgtggagtggagagactccaggatcatctgaaacaaatagacacatgtattcttgacttttttgtgttttatgacagaatttcctaatgagatacaaggcaaattttgattcctggattggactgcacagagagtcgtcagagcacccttggaagtggacagacaacactgagtataacaacatgtatgttttcacgatgtttttccttctattatgttcatgtgttgtgatatgtgtgtgtcgtggctatgagagatggaagtcaatgtcatgtgaagccaactgtactgggaagaaagaaaaaaaaatgaacccttgcctggaggtgtggctcaggggtagagagtgtgtataaatgcaatatccaatccccagaaagctctacacacccacaaatttaaatacttcagaggttttcctgtttattgaccgtcattttcaaaacctttgcatcatgtcattttactcaaaatatttaccataatgatggtgtctgagagtagctattgtttgctctggctccaacttaaacatttctgttgttgataaatgtcctgtgagggatatagacagagccttagatgggcagtgggggctctggaatcccagaaagccactgcagtatctgcaagcctgagattcagctttccactatttgcatgtctgcacctgttcaggaaagcagagactctaagtacatttggaacctcctctaaagtctcgtcatcactgagcacccaaaacagtccttgggtttgagctgttttactgggatggtaaatcacagactcagtcacatccatcactgaagcccttagagcaatttactaagtgggcgtccccatatataaaatgcctaaaacagaattgaaaatcacccttggtggggtcactcatggctgcagttcatttgaacatggcagcgagcaccagcccaatgccttgtacacacattacaggattcaccatggacaaatgacaaaggagtggtgttcaaatcctgagaatatgagacagtaggtgtaaaactaatgcaggtgattcctcagggactttttgattcatattaccaaaaattagtggagactggtgagatttcattgcaggagcaaatgcagttctgggctctgtaggcttacttttttggtttcttttcaggattcccatccagggagtggaaacatgtgcctacctgagcggcaatgggatcagcagttccaggcactatatacctcggatatggatctgtagcaagcttaacaactatagcctccactgcccaactcctgttcctgtctagcatttaccaagagactcttcctagcctgttatctatgggtgctactttttcccctatggtcccacagtgctatcaaacgggattgagaatattttttaacgtcgcaaatgaaaaccatcaaggctggagagattgctccgtagttaagagactgactgctcttctgcatgtcccgagttcacatctgagcaaccacatggtgtcttacaaacatctgtaatgacatcttatgtcctcttctgtggtgtgtgaaaacagctacactatacctacatatgataaataagtaaatcttaaaaaagaaaaagaaaaccaccttagagaggtgcacacatggaggattacaagaccatagatgagttttaaatagatgtcagcactcataccttaagcctaaagtacaactaatgttagggaaccccacttttatgatattaaggttttgtgcagagaattcttcttttgaatttatgagaccacaaaaatgagtcccccaacatgggtgtaacctttaataatgaaagcagaatggctgggatcctgagaagcatctgtaatcccaggtaccgaagggttgacacaggagggtctcaggttcaccagtggggacggaaagcacaaaaacactttaataatgatagggaagatgagatgtctgttgcatcccgtaatttgaagaaacatattatacatgcttttcaaaaattcaaaccaacatacagaagaatttttaaaaagtgtgtaaaattaagatttactttttactctgcaatttaaaaagatgagggacattggcgaaatgtttctccactttaattttaatattcctatttccaattatactgttctaagtataattatacttacttacttttcctgttctaagtgtactgcattttataatcaaataccattttaatttcactattttattccaggagccttctggcccaggccagtgtaatggtggagtctatatagaatcactacaagatagttcatctttgtggatctgcagagatctgcttcaaagggggagtgtttctactcagcaattgttatatatgtttaacaataacagtaaaagcacattaatagcaggaatctctcctaaaacgagtcactcatagccttgcttaatgagggctcacctgtcacagattatataataatctgaggcaggccacttcaggatgatcacctgctagttattagcttgtctcattatgggtcctgaccattttttttggatttatttcacatcaaatgtgagttaaactccttaggcatttaatacttaattttacactagcatgtgcattactgagcctttaaaaaaatattgaaaatcttatagattgagctaccatgtactgatgagtcccaaaagagaaaaaatcataggctaaacgcagctcttggtctcttcatcctttcttctccttcttggtctttttaaagactatatcaacttgatatgccaagggggagttgatatccatgggaggcctccaggtctttaaggagaaagggatggagaaatggaggaagggaaggggagagggacatagggggagggaggagggaagggaaattaaaaaaaaaaataaaacctaaacactacatttgtacggacttcatttatgcttattgcttgtatgttcatatgtatttgccccacctgtgctgggcagacaatgcagagacagctcagacagagatcagacaggaccagaaggaatcagctccctgcttactgtgagtggtgatgtggatgctggaaatggagcaagaacaagtgctcctaactgctgaagccatctttccagcctttttgtgttccttttattggcactgctgatcaagctctgcaaaagtagcacgtatccctgcagtttttgtaattttcttataagttcttgcctaaatctgtgaccctccttaagtagctggggtcacaggtgtgtttcaccacaccagccattctacttctcaatactaaagaccaagaacattttaaaaatgcgttgatgctttgcctgcatgtgtgtctgtgtaagggtgccacatcctctgaaactggagttacaggcagatgtggctcccatatgggtgctgggaattgaatcaggtccaatgcttctaatcacacatacattttgagtaacgcattgtctttattttaaagccaggtttaattatttattagatgaatgcaagcacatttcactctgaaaatgactttcttagccccccccatttagtcctaataatactatttttttgcaatccattttacttcctacatcctaagagataggtagactatggtcccagggatggttcagagaaataaatgttaaacattaagaaaatgctaatttcaagagagttaaaagttatcattaatatttccatgatgtttgtagaacatgattttaattttttcaaccattgatactcaccaaacagaatagttattttaagatgtattttcttgttatgtctcccttttcatttctgattttattaatttggttactgactctgtgctctcagtttagtctgtctaaaggtttatgtatcttattgattttctcaaagaaccagctcctagttttgttgagtctttgtatacatctttttgtttctatttggcttgattctttactaccttctactcctcttgggtgcatttgtttctttttgttctagagctttcaggcgtgctatcaagctgctagtgtaagccttcttcagtttctttttagaggcacttagagctatgagtgtttctcctaccagtgctttcattgtgtcttaaaagtttttgtatgatgtgtctccattttcattaacttctaaaaagtctttaattttttttttatttcttccttgaccaagttatcattaagtagagcattgttcagcttccatatgtatgtgtgcttttcgttgtttttgttggtatttaagactgggcttagcctatggtgatctgataggttgcatgggattatttcagacttcttgtatctgttgaggcctgttttgtgaacacttatatggtcaattttggagaaggtatcatgaggtgctgagatgaaagtatattctttggcttttggatgaagtgttagatccatttggtttataacatgttaatttcactgtgtctctgctttgtttctgtttccatgatctgtccattgctgagagtggggtattgaagtctcccactattattgtggagggtgctatgtgtgctttgaacttcagtaaagtttattttatgaatgtgggtgcccttgcatttggagcatagatgttcagaattgagagttcatcttggtagatttttcctttgaccagtatggtgtccctccttatcttttttgataacttctagttgaaagtagattttattcaatattagaatggctgctgaatcttgtttcttgggtccatttgcttggaaaattgttttgcaaccttttactctgaattattgtctgtctttgtcactgagatgtattgcctgtatgcagcaaaatgctgagtcctgtttacatatccagtctgttgacaaaagaagctaaaggatgcaaaaataaaatatagggacatttacagatgcccacttgagagaatttcatagtttcacaagcgtgccttgaagctgtcatgtgagttcatagaagagcaggtatgtatgatactggtcagattaaaagccttccaggcctttgttttaagctgtcaggcttttgtcttaggtcaagagggcataggagttttgcctgcatgtatgtctgagaaccacataagtgaagcagaggccagaagaaggtgtctgagcctccagaatgagagttatatagatggtgtgagcagcatgcgcactgagaaattcaccctgctcttctgcaaaatcagcaagtgctcttaatcaatgagccatcgctccagccatttactcaaagtccaaatgtggaatcactgttttgctgctggatgctgctgtatattgcctttatgcattctgctacaggaacagaacacaacattcatagtcataaacacattactctttccaaaatgcactgtgtttactcatttttcatctgttgcacttagttctctattacactgtcacacactgacatttcttgcattatttttttaaggtagtatatatatattttatttttttattatatattttcttcatttacatttcaaatgctatcctgaaagtctcctacacagtccccccaccctgctcccctacccactcagtcccacctcttggcactggtgttcccctgtactggggcatataaagtttgcaagaccaaggggcctctcttaccaatgatggccgactgtgccatcttctgctacatatgcagctagagacacgagctctgggggtactggttagttcatattgttgttccacccatagggatacagaacccttcagtacctccattgggggccctttgttccatctaatagatgactgtaagcatccacttctgtatttgccaggcactggcatagcctcatatgagacagctatattagggtcctttcagcaaaatcttgcaggggtatgcaatagtgtttggtggctgattatggaatggattccatggtggggcagtctctggatggtccatccttttgactcagatccaaacattttctctgtaactccttccatgggtattttgttccccagtttaagaaggaatgaagaatcaatgtgtttgtcttccttcttcttgattttcttgtgctttgcaaactgtattttgggtattctaagtttctgggctaatatccacttatcagtgagtacatatcaagtgacttcttttgtgattggtttacctcatgcaggatgttatcctccagatacatccatttgctaagaatttcataaattcattgtttttaatagctgagtagtacaccattgtgtaaatgtaccacatgttttgtatccattcttctgttgagggacatctgggttctttccagcttctggctattataaataaggctgctatgaacataatagagcatgtgttcttattaccagttggaacttcttctgggtatatgcccaggagaggtattgctggatcttccagtagtattatgtccaattttctgaggaacctccagactgacttccagagtggttgtacaagcttgcaatcactccagcaatggaggagtgttcctctttctccacatcctctccagcatctgctgtcacctaaatttttgatcttagcaattctgagtggtgtgaggtggaatctgagggttgttttgatttacattttcctgatgattaaggatgttgaacatttttttacgtgcttctccgccattcggtattcctcagttgagtattctttgtttagctctgtactccatttttaatggcgttatttgaatttctggagtccagcttcttgagctctttgtatatattggatattagtcccctatcagatttaggattggtaaacatcccagtctgttggtggcctttttgtcttattgacagtatcttttgccttacagatgctttgcaattttatgaggtcccatttgtcgattcttgatcttacagtacaagccattgctgttctgttcaagaatttttcttctgtgcccttatctttgaggcttttcctaactttctcctctataaatttcagtgtctctggttttatgtggagttctttcatccacttagaattgagctttgtacaaggagataagaatagatcaatccacattcttctacatgataaccaccagttgtgccagcaacatttgttgaaaatgctgtcttttttccactggatggttttagctcctttgtcaaagattaagtgaccataggtgtgtgggttcatttctgggtcttttattctattccattgttctacctgtctgtcactggaccagtaccatgcagtttttatcacaattgctctgtagtagagcttgaggtcaggcatggttattccaccaggaggttcttttattgttgaggatagtttttgctatcctaggtttttgttattccagatgaatttgcaaattggcctcgctatctcagtgtagagctgagttggaattttgatggtgattacattgaatatgtagattgtccaggatcttctgtctttcacagtctctggtgaaaagtctggtgtaattctaataggcctacctttatatgttgcttgacctttgccccttattgcttttaatattctaactttatgtagtgcatttgttgttctgattattatttgtcgggaggaatttcttttctggtgcagcctatttggagttctataggcttcttgtatgttcatgtgcatctctttctttaggttagggaagttttcttctataattttgttgaaggtatttgctggccctttaagttgaaaatcttcagtctcatctactcctattatccgtagatttggtcttctcattgtgtcctggatttcctgcatgttttgagttaggatctttttgaattttgtgttttctttgattgttgtgtccatgttttctatggaatcttctgcacctgagattctctcttccatctcttgtattctgttgttgatgctcgcatctatggttccagatttctttcctagggtttctatctccagagttgtctccctttgggttttctctattgtttcttcttccattttcagatcttggatcattttgttctattccaacacctgtttggttgtgttttcctgtaattttttaagggatttttgcgtttcttctttaaggacttctacttgtttagcagtgttttcctgtaattctccaagggatttttgtgcttcttctttaaggccctctaaatgtttagccatgttctcctgtatttctttaggtgagttattaatttccttcttaaaatcctctaccagcatcatgagatatgattttaaatctgaatcttgcttttcaggtgtgttggggactcgctgaggtgggagtgctgggtttggatgatggtgagcagttttgatttctgttagtaagattgttccattcgcctttcaccatctggtaatctctggcattagttgttatagctgtctttggctggaggttgttcctcctgtgattctgttagtctctgttagcactcctgggagtccaactctctcctgagtctcagtgggcagagtactctcagcaggccatctctcctctgacaggggaggagcacagatgtctggagctcagatctacttcttggctgaagatgatgacccaaaactgggcctgtcccagaagctatgttgcttcttcagtgtgcaggttcccctgcacagactggtctctgagggaccagggatacaagatggctctctcacctgttccagctgttagagctgtccctagtggccacctctcctttggcggaaaaggagcacagggtctagaactcagatctgctgtgttgtatcattttgatttacttatcatgaatcataatacaataggaattctcatgtgggcatgcactaagaaagggaattgtttgccctgggattggtcaggggatccgtttaaagctgtgactgttttcttttctacctgtacctccacagcctctctttaatgctgtctatagcaaaaatcagcatcattgtgtattactagagttgccaaatttggagactctataatggatcctcatcaaaattaaaataaatccccaaattaatcacaactggggatggagtaggcttttcacattcatgaccccatttccttcaataggagcacaccttgtctagcaaggccatatctcctaattcttcctaaacagctccaccaactaggtaccaagcatttgaatatttgagtctatggggccattctcattcaccatagtgttatatagaaatatgggtaaaggactttatgagccatctctgctaaagggaaacattgttctgttcatggtaaagctctttgtcatgtactaagtgctggatagatggctcagctatgcaaagctaggatcacaactgaaaagacaagaacaatggctaaaacttcccattgttagacactctttccatcatgaattttgggaggtgaagaactaaatgagaaggtcaaaaccaggcaacctcattagctcaaaaaaaacctgaacaaagactaccttcagcaaggatggaaaatgtggtgttgggttgcttctgacttacctcctgtgctagaagacctcaggagataaattctcagatccttgttttgcacctcaaatttgtgctgacatctgagaaaattaccgcttggacatcagaaaatctgagtgacccatcttcaactgcattgacaatttccaagtaacagaatttaaaaaccctctgactacatttctattaactctcattttataatatattttatttaatatattatattactatattaattatacatccttatattttatatagttaatatgctaaatattatattttttaaatttagccttggttgacttggagctccctatgtagaccaggctaggctctgattcatagagctctacctgtgacagcgtccccagggccgggatcagagcccatgtgctaccataccatcacctaaatattttatcataaatactttttaaatagtctgagacatttgcaaattccttgccatatgttcctaaatgataaaaataattctaaacgcatcttgcatgaggatgaggatgttctgctgttacatttttggggtacctacattctaaacccaaattctttaagcctgtgaactcagctctgagcaatcttacaccctctcctggcctctacgggcacctgcatggttccactgagagtcacacccacatatatagtcaaaatctagagcagtttttctatacctgtgagatgcaacctcttttttggggtgcgggggtcgaattaccctttcacaggggtctcatatgagacatcctgcatatcaaatatttacattataattcataatcgtaccagaattacagttatgaaatatcaacaaaataattttatggttgagagtcaccacaatgtgcagaactgtattgaagagtcacagtatgggcaaagttgagaaacactggtctagaggcattccttgtgctgataaaggtggcagtgggcattattctgtctccataccagtagcaaaatgtttccatatgtaaacatgtaatattagacagcctgagtctgtagtcctgaggtaggatctggctccagaacaaaggatctcttattccctgagaggcaagaagtttgtttagctctgactgtgatccccaactctctcctttctgactctgtctcctagagattctgtctctgggcttttcaacacacagactcctctgaccttgccctggatgtccctgtaaaatgcccccaaaacccagagctgtaacaacgtggggctcgcctaccttaaagatcactgtctgatgtgtggtattcagggcaggaaaggattggtaatattttctttttgttcttgtcatgtttgtgtgtgtgtttgtgtgtttttttgttgtcgtcttttatttcctaattgattcccgctggacagtaaaactggtctcaccctccagccccttttggctttgttaaaagctctttgtctacagcattagtttcacttcattacagtctaatgaaatgcctcccttacaatgcttcaatttgagtcaaacaagtttgcacaggaaggagtagctcaagcttccggattggccagttgggctaaatactgaaacctcctctgtatttgtgcttctcggctttcaattttcaatcctgtagtggaaactcagcttctcagctctgagatgagtgttacaaaggcttcccttcctatgctcagcactacaagcagcccgcaggagggagaagtgggtatgtattcaatactatttgaaccaaactataagagcagagaggagcttcaccagggaaggaaggcaaaagagctgaaccttgaacaaaataaggacagaagggcgtctgtgagcctgtcaaggtgtgtctgcagagcaggagaatgcagatcggattagctatgaggttgttacattagttattctattggagtatacaatactcaaatagttctcaggcaagagaaatgaacagtgagtcaccttctaagagccacagctttctttctttgtacttatcttgctagagcactcttcctagggatctggtaagctacaatctggtggattaccttattgtggaaaatgctagctctacaagtccctgagtggaggaaattcaaacagtagctttgcaatgtgcatagtgacagaagttgcctgggaagcttggggtttttgtttttcagatccattgtaattgaaaaagaattgtaaggaggtggcatggggtgggggtggggagttgaacctacccaggaccacatcctttccatttttttgagctcttgataagttatagaaaaagaatataatgagttttcttcttcagccttcagaaaggaagcaaaagtgtgtttcttgtgtctcaaactgtctatgcttcattatattgtgttcctttatcttccttttttcctttattactgttccttcatctcttttttctttttgtcatgtattgaagaatactggattttgagaaaacaagatcgatatttatcaaaatacaaaattcacaacaaatgttaatgcttatcacttaagccaagtattctgactgaaactattattattattactgacaatgatgatgacaattgattgattcttcggcattttgaataatgttaggacagtgccatagcaagaagagcaaatatgaagcattttgtcaatagaaactgagttttggtaaagaagtgctacagacagaccccttttttgggtctcctatctgcatggatccggctactggttgcaggtgggcgaaggagtcagtgaaagtggggagacaaacagacacaacacgagagagtgttttgaatctgaatgtaatgtccaaaggaaaaacagacttttttatacagaagaaaaacaaaacaaaacaaaacaaaaacaagaaaagccaggcgggacatatctgccaagttatagtgacacaaaacaaaaggaatgtatacatcaaaaggtggtggaggatcaggctgcatttaccacttagaatggagccaggtgtaatgctagtctatgttaaaccggcaaccagaggttcttaataaatacctgataatgctgttcctttggtcctcgtgaagaaa

SEQ ID NO: 993 - DNA, 2232 bp, Mus musculus
caatcctatagtggtaactcagcttctcagctctgagatgaacattacaagggcttccctacctatgctcagcaccacttgcagctgcaggagggagaagtggaatttcctagggagatacgaggggacttttgactactggatcggcctgcacagagcgtcgtctaagcacccttggatgtggacagacaacactgagtataacaacatgtttgtgtatcacatgaatgcacagtgcctaaagaagccagaagaaggcgaaggctcccccggaactggaggtgtgcaatgttataaaattctccaaagaaaaagtctcagagccatctcccctgagtcttctgctaagctttactgctgctatggagtgatcatggtcctcactgtagctgtagttgctctttctgttgctttgtcagtaacaaagacagaacagatcctaatcaacaagacctatgctgcttgcccgaaaaactggattggagttggaaataaatgtttttatttttctgaatacacaagtaactggacatttgcccagaccttctgcatggcacaagaggcccaactagctcggtttgacaacgagaaggagctgaatttcctaatgagatacaaggcaaattttgattcctggattggactgcacagagagtcgtcagagcacccttggaagtggacagacaacactgagtataacaacatgattcccatccagggagtggaaacatgtgcctacctgagcggcaatgggatcagcagttccaggcactatatacctcggatatggatctgtagcaagcttaacaactatagcctccactgcccaactcctgttcctgtctagcatttaccaagagactcttcctagcctgttatctatgggtgctactttttcccctatggtcccacagtgctatcaaacgggattgagaatattttttaacgtcgcaaatgaaaaccatcaaggctggagagattgctccgtagttaagagactgactgctcttctgcatgtcccgagttcacatctgagcaaccacatggtgtcttacaaacatctgtaatgacatcttatgtcctcttctgtggtgtgtgaaaacagctacactatacctacatatgataaataagtaaatcttaaaaaagaaaaagaaaaccaccttagagaggtgcacacatggaggattacaagaccatagatgagttttaaatagatgtcagcactcataccttaagcctaaagtacaactaatgttagggaaccccacttttatgatattaaggttttgtgcagagaattcttcttttgaatttatgagaccacaaaaatgagtcccccaacatgggtgtaacctttaataatgaaagcagaatggctgggatcctgagaagcatctgtaatcccaggtaccgaagggttgacacaggagggtctcaggttcaccagtggggacggaaagcacaaaaacactttaataatgatagggaagatgagatgtctgttgcatcccgtaatttgaagaaacatattatacatgcttttcaaaaattcaaaccaacatacagaagaatttttaaaaagtgtgtaaaattaagatttactttttactctgcaatttaaaaagatgagggacattggcgaaatgtttctccactttaattttaatattcctatttccaattatactgttctaagtataattatacttacttacttttcctgttctaagtgtactgcattttataatcaaataccattttaatttcactattttattccaggagccttctggcccaggccagtgtaatggtggagtctatatagaatcactacaagatagttcatctttgtggatctgcagagatctgcttcaaagggggagtgtttctactcagcaattgttatatatgtttaacaataacagtaaaagcacattaatagcaggaatctctcctaaaacgagtcactcatagccttgcttaatgagggctcacctgtcacagattatataataatctgaggcaggccacttcaggatgatcacctgctagttattagcttgtctcattatgggtcctgaccattttttttggatttatttcacatcaaatgtgagttaaactccttaggcatttaatacttaattttacactagcatgtgcattactgagcctttaaaaaaatattgaaaatcttatagattgagctaccatgtactgatgagtccc

SEQ ID NO: 994 - protein, 277 aa, Mus musculus
NPIVVTQLLSSEMNITRASLPMLSTTCSCRREKWNFLGRYEGTFDYWIGLHRASSKHPWMWTDNTEYNNMFVYHMNAQCLKKPEEGEGSPGTGGVQCYKILQRKSLRAISPESSAKLYCCYGVIMVLTVAVVSVSVTKTEQILINKTYAACPKNWIGVGNKCFYFSEYTSNWTFAQTFCMAQEAQLARFDNEKELNFLMRYKANFDSWIGLHRESSEHPWKWTDNTEYNNMIPIQGVETCAYLSGNGISSSRHYIPRIWICSKLNNYSLHCPTPVPV

SEQ ID NO: 995 - DNA, 51994 bp, Homo sapiens
ccagctggaaaccaccggactgacgattgttgtgcttaggataaggcactttgtgatgagttaggaaaacaacaatcagatatgtacacttcaaaattgacctcaggaaggtaagcagaaaaatagataaaatgggtgagaaaatttctttattatgtttcattgtgattgtctcacttttagcaagaaaggaaaagccagtggtagagtcatctaaatacgctgcttgcccaaaaagctgaattagatttaggagtaaatgtttttatttttctgaaggcataagaaattagacattgagtcaaacgttctgtgtctcattagaagccagccttgctcagtttgcaactatggaggaactggtaagagatatttttggatcatgttttctgttaaatacttagccccctgaggcaggtcggctacatagggttaaagctgaaatactaagaaggatcccattccaggggcatgagatgtgttttcatgtctaacatttgttgagggtgtgttctctgcctggaaccctgtcagacattttagatatatttccccatgtaatgctcatggtgagctggtaagatgagatgtattgttctcattctattaagaagtaaggtaattatataatttgtcatctagattaagacatatagggcattaaaagtgatcattaatacattggtggaatgacaagcataaactgagaatttcccaatgaaactgggatttatgctcactttaaataaagtaatttaggatcagagacgttaaatgacttaaactgagaactgggaattagtctcactccagaatttatgctgcttaattataccacgctgccagtgaaaaagagaagggatagggaagagagactccagagtaatatgaaagaaaggggctcatggtgttagtttctgttttattatagaatttcctgaaaagatacaaaggcccttctgaccattggattggccttagaagagaatcatcccatcgcatttggaaatggacagacaacatggaatataataacatgtatgttttgagacttctcatcttttgctgtgtttatgtatggttatgtgtgtgagttgtgtttatgagataagaaatgtagtatcatggaaaacttactgcaatatgaggtaagaaatctaaaccctttttatgctcttcagttggttagctgtgtctttgggaaagctttacctgtgatttcagttgaagtctttaatgtgacagtgacatttctcacaattttacactttcatccactgatttaaaactgctgaaatccctacttatagctgatgtgcaacaaaggttctacaatcataggaagccactgaggagctgatatccacaaggctgttaagcccactcttgcaggtgttgcatccatttacaataggaaagcatccagggaactcatgggaatctctccctcctaaagctttatcaccagaaggaaactagtaacagttccttggactgtgaacatttcaaaggggtattttgaatataatcattacattgcagcagataaaatgtaggaacccagtcatatccattaatcaaagctaagccctttcaggaatttactagttttttttttttttttagttttcacacatttataaaacaatttgggaggaggctggaaatcatcttgactgaagaccaccaatggcagcagttcatttgggtacagcagcaagcatcagttaaatacctatcaacatagctgggcttggtatggatgaatgataagcttgtgattttcaagcaaggaccttgaggacataaaggacactaaatacagaaatggtttatattactatgaagcaatattaatgacagacttttgcttttctcttattcacattgaaatatggaggggttgcagaagatgatggggaggaacaaatgcaggtgtctaacttacaaatatttaatatttttgtgtttggatttaggcttgctatcagaggaagtggagaatgtgccttcctgaatgacaatggagtcaacagtggcagaatctacatgaacagaaaatggatttgtagcaagccaaacaattatgtctacagttgccagttatgtccccactgggatactacctagtagagctgtgagaagagggccaccatcctccagactccagaatggtggaatcatcagcagcttccaccatgcccctggaaaaactgcaagtaacagacctgcacatgtatcccctacatctaaaataaaagttggaaaaaatggaactttgatgttaagatgcactgatacaaaacttaaattttggtctcctacattaaaacaatatgagtctcttaaaatattgatttgttcttagtaagattacaagaggctttgatttttaattctgcaatgtttccttaacagccattctgaattacaaactaattcctatttctgccacattccttcctgagaactgtctagtcctggtttgggatttatcttaaaggtctagaaaggcaacattttacttcagcaaaacttgattctatattgttgttttttcttaatgtgtcaaaattgttttgttactaggatttcctatgttgttattaaatgtattcccctgatcaaggtcactggcctagaaaacaaagattctgtgttttaccaagataattcccagtgcttcatggtgtctttattaggctttgactgcttagggaaactgagccttaaaagggtaaaagtttttccatccatgtaactttctgaggtctttaggttgtcactctgattaaatgagtagtattcttagcagtgacttattatctgttgaaggaagtattttaagctttttgacatctttggcaggtttctctagaatccaaatcctaaattaagccttttggcctaaaattgactgggatttttccaggtggaccccctagatatgctcctccaaaggcttgtctttcttgtagagttattaaatgattaggcttatttggcaaatactgctagaagcattgtcaaataagaaatggtgttttacctttctttaagctgtgtttgtgtaagttcatcatttatagaaatgtgaaattttatgagattcctaagatactgacatgctgagatacctgtaataattgcaatttttatgttggatgattgtatgccacagaagcacttaaatttcctggttaattggtaacgttaatcagatctttacctatggctgttctgggtttttgtcattcacagttattattttaatttcttctttggaagcgttcgcaatcagctatagtccaaaattgctaattaagatcaagcaaaacaaaattaattacgtaaaattaatttataaggatgtttttatgacgtaaatgttttattttccagagccaaggaaattttctgtcacaagctatctaccgtttgcaataatttgataaataatcctttgtgaacaaatatggaagcatttgctttttctctctacttgattccttcaaaattcagaaactatttgtggatatttttagttttatttatacaacttcagtaaaaatccactctctctttataagcaggatccagttggaaacattatttatattgctaaggtttggcttgaaatgtcatatttcagaatgtgcatagaggccaggggtggtggatcacacctgtaatcccagcatgttggcaggctgaggtgggtggatcacttgaggccaggagtttgagatcagcctggtcaaaatggtgaaacctcatctcttctaaaaacacaaaattagccaggcatcgtggcgcacgcctgtagtcccagctactcgagaggctgaggcatgagaatcgcttgaacccaggaggtggaggttgcagtgagtggaaatcccaccactgcactccagcctgggcgacagcgtgagactgtgtctcagaaaaaaaaaaaaagtgcgtaaaatgccttgcttcatgagttcccagctttacagggaatgagtaaaaattgtcactttctggcaggttcaagaaccttattataagcaaaatccaaaggctgctttggtttggtttcctagcctcaagaggttctaaaatctaagacctcctacatcatcaacgggagagaaaaattatgcttctaaggaaagcaaagttacacctgtttttagattttaaccctgtacattgtcttcaagtccttgttatctgcctgtggactgaactagatcctgaattctcctaagttcctccaatattaggttataacagtcctgatggagtcccccaaccctcttgcctcgatcctgactagggatgctccagggacattcaggtgacttccccttcttaaaaatctgaccagctagggacattagataccagaattgggaacaaactggatccataagatactatggtcagtaatgagatcttattggtcagtgactttttttttttttttaaatggagtctcactctgtcacccagagtggagtgcagtggcatgatctcagctcgctacaacctcccatctcccgagttcaagtgattctcatgcctcagcccctcaattagctggggttacaggcatgtgccaccacacctggctaatttttgtatttttagtagagattgggttttgccgtgtgggccagactggcctctggcctcgaactcctgacctcaggtgatccacctgcctcggcctcccaaagtgttgagattacaggcatgagccactgcacctggcctgctcagtgacttctaacattgctgctgtacctgggtaaatacttccagtcatatttaagcgggcttggagttggcaaaatctctgagagagacatcttcggaaagcctccatgctggacttagtggataaagtttccaatgtccagatattttcagctggtttctccttggtataggatttcttctgcattctaccctgcacatcttaatgataaccctcatattttggctaagcatttgactcccctttagaattgttctaacttgtttttaacagatgtctacaagagattcccaccaggatcctgcccatgcaatctttgagactttaaactcactccagctggaaataggaaccaacttaacccaagagactttggttcacatttaaccagtactttcctgaatgcctctcctaagtaaatggctctagtttctctattggccactgcactgccactaggattcctgcaagggatccgatgggcccagagcaggtagccaaccacttctctgttggatggaatgcaatgctgtttgccagcatgtttgagccagtccttcaagatggattctgagtgactaactggacctaaatttaaatagcacaaagcagccatttgctaactagatttcatacaaatgctctgagttcctggaaaacccacactccttaactttgggactttcaagactcacctaaatcaatcaattaaagctcacttgtgtcagctaatcagggatcagctgtattgactaatgaaaactaagcgagtttcaaattttaaccatttatttgtgtagaagacttgattgggagcctgggtatgaatacttgctataaaatctgagcattccctttgttctctggagcaaacaatgttaagttgttaactctctgtacctttctctagaactggatggaaacaactccatctgaaatgcagccctaataccagggaactcctacagtaaagcgctaaacaactttattactctaaccaacgtttatgtccctaatcagcaagaagtagttagaatggtcatcatccctttccctcaagattgaggaatggacataaaaaggaggggatttgtaactgctccagactgatctgttgtcagaaaggggctcttgaaccagaccatgaaagagggttcttggatctcctgcaggaaggaattcaaggagagtcacagagtgtagagagaatagacagtttattgaaagctactcagttacagagtagggcatcctccaaaagcaggaggaggaatgtgctgtctttgttttaaactcttcttttataggggtttaatctatgtaaaacctaagctatgtctacatgtgggtaggctgtcagtgtgacaaaatttagtattttgttgatataaagaaacttatccttgtcatcttagtgcataagtacatcaaagtatgactttagctaccttaaaagcatgtattgttatgtgatattgggacatctggacattctgctgtcgtaggagtttgtccttgcagcattactaaatcgcttccttagctgtaaacatcttataatcgtaggtcataactgtcaaggaagtgccttgctagtttttagatggagttgattttaaaatagtgtcactctggctttcctatgctcctgctttcctaacaaatctggttcaacttttttttttttattcaacataatcttttttttccatactacctcatttacagagtgcttcctatagatatggttggtctgtatgtttcctttttcagctttgattcttatttttttgaatcacacatgctttatgggggcttccactaccatgagccatattttctgtattaccagcaagatgtttgggtttgttttttgttttctttatatttcaaattttattttagatttaggaagtacgtgtgcaggtttgttaacatgggtgtattgcatgacgctgatcttacaataccaatgatcccatcactcaggtagtgagcataatatccaataggtagtttttcagaacttgccttatcttccctctctccctgctctcttaattcgaagcctatttttcctatctttatgtccacatgtttccagcatttagctcccacttatacgtgagagtatgtggtatttgtttttctgtgtctgcattaatttacttaggatgatggcttccagctgcatcttttgttgcaaaggacatgactttgttcttttttatgactgtgtagtattccatggtgtatatgtaccacattttctttatccagaacactgttgataggcatctacattgattccatgtcttggctattgtgaatagtgcagcaataaacatgcatggttcaacttttatggtaacaaagctgtgagttgttcttcagttgtcatggaccctcactcaggtcatgtaacctgagcatggacaggtgaaacaagtgtgcaaccacaagggaaacctaatcgttcagactgaggtacagggaccgaattaagaggtggacacaggatggcaggatccaggatccaactggatagaactcaggcatcacttcatggcaggatccagtcagatcttgcctcccagcatcacctcattgcaagatccaatcagattattcctcactaccctatgcttataaaacctgacccacctcccagcttggcgaggtactactttgggagctttgtccagtgttctctttactttctgtaagaacaaaatctccttgctaaatccaccttgtcggtggtcattgggttgatacctgccaagtgactgaacccacctgttgtgtgggtaacatttagaacatattttccatttctttattttccttgactgtctgcattggtgtctgtgcaccagataaaacagcttcctttccagtcttcacagacaggtctcagataggacaacacctttaccaatcagtccagacagaggttctgggtgccacttaaaccttcctggtagttgaaaccacaatgtttgttcttaatggtcctcaggcatctagagtatgccaggcccttccagtgctctcagatacatgagataaaatccagttcctcaggtagcagccagaaaagctggggtgctagttatttggtctgtctcctttgcttttcagagagaagctggaagccaggctttatcactgcactgagccaaagtggggagcagggggaagtgcccacatgcttattaaaaaccgctctgaaaatatttgaagtaacagggctataacaattattattttaaaagcaactgctgttttggtttgtgtagccccagaggtttagcagatgctgggccctgtcagctcaccaaaacagggaaattagaaaccagtctatctggtagtatctagagaagttgtgataccagataggtggtccaaacccttcactcctcagggatagactaagagatgggagttccttcccgatcatatggcattgtattagggttgggggttatgatcacagtgtgtgcaagttttttcctatcagttttgatgtggatagtttcacactcacctagggtgcaggagtggctcagtcagtttctggatttccaatgatgggaatttgcctctgtgttgctgttgaattgatggtggggaaggagagtttagggccttctattctgccatctgtgactctgacagtttcttttaatgttaaactatcatacagtctagttactacatttgtagacatttctctcgcacaaatgacaacttatatttacacaaaagcctgtatataaaatgtgcataacagctttattcataatagtcaaaacttgtaaacaactgtatgtctcacaatgggtgaaaaattaagtaaattctgttataggcatacagtggattactactcagcaataaaaaggaatgggctattgatacatataacaacttccttgaatctcaaagtacttaggctaagtaagaaaagccaattactgaagatcgcattctgtgtgatttaatttacgtaacattattgaaatgacaaaatggtatagatagagaatgagggttatggatgggtgagtggagaagaaggggcagtatggagaaagggtggtgtggctctccgtcgtgatggaagagtttcgtttcctcattgtatcaatggcattatcttagtcgtgatattatagtgtagttttttagatgttaccattgggagaaactgagtaaagaagatgtgggatctttctttagtatttcttagaactgcatgtgaatctacaactagctcaaaataaaaagtttaattataaaataaaagctacatgaaatgaagcaaaaaataattcacccttgtcacgcacacagagtcagagactgtaacataatttgcaggatctagagcagaatacaaatgtaaaacatcttgttaaaaaattattaataattttgagacattgataaagcattaagccgcctgtggggccctttaagcatgataaactgtgctaccacacagattgcacattcacgtatctggccctgcaaatggaatgatttttgcccatgatcaattcaccatggcctctttgggctcagtgaatttgcttcttcaggagggtaattttctcttctttctctgctaagctgtttaacagtagttgccctgcctaatgggcttcatccatccatttctctcagattattttcatgatgcactaggatgaagcacaccctttctcctagtcttgaggaaacgtcgatattcagaatatttaaacgcaggcactgaccaatcagaagagtttctggccaacgttccacacttgagggaaatgacattatctgagccctgaagaaaaacgttgtagatattctccagatcaaagcatcgacaggaagattttagatgttgaagttcgtaatatttcctaaagcaggtatgaattactagtaacttaataggtatattaactgatgaagttttcatttctcagaacaaaccagtcaaggaaggtgctattatactccttttattcatatagatcttgaggctgagacagtttaatcaatatgctataattattgtgtaataataaattaccataaactaggggtgctatgatctcaatatttgtatctcccactcccaaattcacatgttgaaatcctgactcccaaggtgatggcattaggagatgaaacctttgtgaggtcattaagtcatgagggtagaataccgatgaatgggattagtgcccttacaaaaggggcccaccaaagctgccttgttccttctactatgtgaggacacatctagaagttaccatcaatgaaccagaaagtgggccctcaccaggcaccaaatctgccagcactctgatcttggacttccagcctcctgaactgtgagaaataaatttctgttgtttataagttacccattttatggtattttgttacaggcacatgaactaagacaagtggattaaaaacaacacaaattattattttactgtctagaaatgagaggttcaaaatggctaaagtcagggtgccactgatagggctgcatttcttttggaggctctagggaagaagccgtttccttgcctttttcagcttccagaggccacctgcattccttagcttatggtcccttgctacagctttaaagccagcagcacagcaccttcaaatctctctctgacagtgacattcctgccttcccctaataaagacccatgtgattagattaggcccacctggattatccaaaataatccctctgtctttagacccttaaccatatgtgcaaaatgtcttttgtcatgtaaaataacatccttacctcaaggttttgggaattagcttattaatgtctttagggggtcattattctgctttccacatacatttaaaattaactatcaggctacaaaagtcatatatgaattgagcttgttttgccccaaaggctgtgttctttttttattttttttatttttattttttgagatggactctcactgttgcccaggcaggagtgcagtggcacaatctcggctcactgcaacctccgcctcctgggttcaagtgattctccagcctcagcctcccaagtagttgggattacaggtgcgcaccaccacgcccagctagtttttgtatttttagtagagacaaggttttgccatgttggccaggctggtctccaactccggacctgaggtgatccacctgcctcggcctcccaaagtgctgggattataggtgtgagccaccacaccctgccagctgtgttcttttacatcataatacactgccttttatatccctcacttattcaatatcattaccatccatcatgctgtcacaaacacaaaaacccaagaaaagtgggatacaggtcattgagaataaataatttttataaacttttgttctttcttgtaactttttatcagtcagctattccaatgaagcaaaatctgataatatattgcttttatactacttagttgagacactcacatctattgaagagtaatgggcactttgaaggggcttttttctttccttttatatccggtcaattagtcattaatttctgccttctaatatagactcaactaaaaaattatattttgaaaaaaatttattttctaaatgaaattaaaattactctgtatgtgtacttcttttcctcacactggaattctctaaggacagtgtaaatgcacatcactgtatcttatgtgtggtatcttatgtgtggtatcagctatttaacacaaggttgcataagaaagtaagcacgacgatatggcttagaagtcatgagattcacatagtttaatataaagctcttgtgataattggagagttattttgtcacatttctcctttcataatttatgctccagctctctcagatttcaggtgttttcccaactctgagatatattctcttctctctgggcctaactaaagaaactagaagactttcttcaactggaagacttcttcctccacctcaaatgcctcactttattttttttaattaattaattaatttatttatttattgttttgagacggagtctcgctgtttcgcccaggctggactgcaatggcactatctcggctcactgcaagctctgcctcctgggttcatgccattctcctgcctcagcctcccgaatagctgggaccacaggcgcctgccaccgtgcccggctaattttttgtatttttagtagagacagggtttcactgtgttagccaggatgtatgtatttatttattttgagacagagtctcactctgtcgcccacgtggtgcaaccttggctcactgcaacctctgcctctaggattcaagcaattctcctgcctcagcctcccaagtagctaggactacaggtgcaagccaccatgcccagctaatttttgtatttttagtagagataggatttcaccatgttggtcaggctgatcttgaactcctgacctcaggtgatccacccgccttggcctcccaaagtgctgggattgcaggtataagccaccatgcctggcctaaatgcctcactttatttaactaactccagctcatttgattggtactttcttgggaaaacttcttctgggttaagtgccctcattaactgctctcctaataaattattctactgccattcacatcttgttacaataagtcatgtatacctacttatttttcagtttcatattaacttccttaaagaaagggacattaccctcaaagtccacctggcgtgctggctgaaagatgttaagtttgaaaatatttgttaaagggtaaatgattatgtacatctttaggacttcatgaacttactttcagtttagtttccacataaggagaaacttacagcaacgtagaaaccaagagattgatatgaataaatgatgtgactaactcacaaataccatgtcatttgatatttgacctttaaagtagttttcatatcagatctgtcagtcatgggttctatagcttactgtgaacttagacatattagttagtccctcacccaaaatcatctgaaaaataaaggtaatatcagcctcattagttagttatgccaattaaataagaacacatatttaaatctcatattaatgtgtatggagcatagtaagcagtaataacctggcatgttgtcatgccaggctagtaacagtaaaagtaatagtagtttcactggaaggtccaagattagtgtggaaattccaagatgattagtgtggaaattccaagataagtgtggaaatttcaatttatcagggtttaccttttgtcccctttaagctaacaatgaaattataaaaggatataaaagggataagcctgacagttcatatccacttctgtgtatgataatataactggagagacatcaaactcatgctgagaacaactagaagagttagaattgaagaaaaaggatttcattaagatattagagagtgttcaaggcaactggaggcagaacgaagattctggaaaggggccacagagaagtgagtcagcattccaggagccacccttctcttaggggcatcttggcagtgggtcagatgctgagattctggggagagggctgtggataccaggcatttttttgggggagagaaaaatctcttcctaaagcacttgaaggaccaaaacccccagagaggagagagggccaaagaaatgagaaaaatttttctctcaagcaattttcaaattattaaatttcacaggaaaggaggttaggaagaactatgtgaaaaacagacttgaacttttggcaatcacatgttgttcaggagacaaaaccaaattcaacttccaagaaagagaagcagctttgataaaaagcaggttctcagatggaattactagaaggctttatcataggtcctaggacaaactagaaatgatgaaatagtaaagaaaaagatatataaaatcttacagaaactggaactcagtcctaatgcaacttcatttctatttgataaaggcaatagctgtccaatctggaacttatttcttacaggtaaggggggctactgtatagaattcaaaagcagggaaaatatgttgtcagagttaagatagagattgtatttggggtaatgagcgttgcaggacatgagtagggcacatagcgtgttggtattgttttacgtggttttaagatatacttcatctaggcacttgttacatgttatatttttaatgaatgtgtttagttgtatgcttatgatttgtgcacattactataaattatattttagtaaaaggtgcccttactggcatttatatacaagaaatcaacacatctgacaagaagctcttgctgctaaagagcctctgtgctcctggatcatgccagagggagcacagaagctgcacaccgttcaagcccatttttgaaaagttgttgtagcagccatagcagcaaattcccaaaatatcttgaagaaattgaaaacaagatattttttgaatgagcgtaaactcttgggaatgaattttaatttgagattaaaattgctgttgtctttacttacctaacattcatttcctctgagagccaactccttcctttcaataaattcttattttctatcataatattgctttgtaccgcacaaaatacaattataatttttaatagtcaaagaaattttaagttatcaaacattagtttctttcgtaaccaaaatactgttagagaagtagcttcaactttttaaaattcttacaaacaccagtttattctgttgtgatgagctgatttttgaaacaatttatgcttcatttgttcctctagctatatttaacttaaaggcttgacattttgagttactggggcggttacacacttacacgttttagtcgttgggctttttttttgttttgttttgaatcattcttggggttgaaaacgtagagactgtggtttagatcactcatagaaactggaggcaaaatgcatgacagtaacaatgtggagaaagacattacaccatctgaattgcctgcaaacccaggtaagaagctgggctctacagagtaagtgtgaggactggaatgggaaggtagtggtagtgatgggctcacacaggaaaggtgctgatctagtaaaaagttttcaaggataagagatggaatgtgggagtccataaattggcttataatttgtgtaaaacatgcatatatttatattcccagttctaacaactaaggagagggaacaatgagagaaagatgtaagacaatgagataaggttaagtttaggattgaaaataacagttaatttcactaaaaaaaaatctatacaaactctaaagtgttactcagatacaagataccatcattattacataggtagaaaacctatcatggaagctcttaagagagaaaaggtagaaaatagtatgtaaaggacatttacaaatcaaaaaagtaacaaaggttgagtagaaacttagtagggcattctaatggaattatgttacattggatgcactggaaatatatatatatatagctttatatgatgctttagtaagtgaaaaaaatgacttttgccacagttagggaatatcaaggttttataacttaggacttaaaagtttggagttttctcctcccaacttaaaaggtaatcaatttggagaaaaggtaattcagaggcagaaaaagatgaactctaaatgttgttaaatgacttcatttatttcttcattcattgggtattttgagcattttataccaaatgctttaaactgtttgtcggatagttccaacatctctgtcatgtcctccttggcttgtgttttctttccccatggaagttgacattttcgtggttcttcatatactgtgtaattttggattgtaatttgaacattttgaacaaatatttagttagactggatcttatttaaattttggagtatattgatactattgttttagcaagcaatcaccctggtgagatgaagacaatctgtgggatctggttccaatgtcagttccattctgaaagcctttgtagtgctattcagacatgtgcatcaaccaggggtgaaattgggaactgtgcaatgctctactcattagttcaggtcttagcatctttagtgtgccaattagaaccatatctaggcatgcataagttgaggggcaggtgaatccaggagtttatgaataatgttcatgggtctctttctaaagtttcttcctcttcaccatctgacccgtactttcaggttcccaggggcttctcctttccatcctccagctagaaatgcgggcctccttttattctgatgaaccatatacttctgcaattatagctgcatctttaagctcatgtggcagacggacagtgagaaagaagaaaaaaaaagcaagaggtttggccccactctcatggagctacagctcaactgaatggaaaggattgactttagatttcttttctttttttgaggtggagtctcactctgtcgcccaggctagagtgcagtggcgcgatctcggctcactgcaagccccgcctcctgggttcacgccattctgcctcagcctcctgagtagctgggactacaggcgcccgccaccaggcccggctacttttttgtatttttagtagagacggggtttcaccgtgttagccaggatagtctcgatctcctgactttgtgatccgcccgcctccgcctcccaaagtgctgggattacaggcgtgagccaccgcgcccggccgaggattaacctttctcaaggttttggctattgcatgttgctgtagtttcccctaccatcatcagattgcctgaggtttgaggcacatgagaatgtagacaagagggggagaaaaaataaacgtggtattttcacactctatttgagataggagtttgcttttctgttcctcagaccatacctctagtgcttctcctggagccctctctttatgctgacagaggctcaattccatgtttctggctgtattaagttcggggcagtgatactagaggagggaaatttaaattcaccactggtttgatggctctttaaatttggatattcttgtaagatctgctgctagtatatcctttttccttttgctcttttttgttttgtttaaagaccatatttttagagccattttgggatcacagcaaaattgtgagaaaggtagttttttttttcattttctccttgttgccacacatatatagactctgtcttagtctgttttgtgctgctattacagaatacccaagactgggtaatttataatgaacaaaatctattggctcatagttctggaggctggaaagttcaagactgagaaacacatcttgctccatcatcccatggcaaaatttggaagggcaagagagcacatgcataagaaagagagcaagaggcaccaaacttgcttttataacaaatccactttcgtgatagtaaacccactcccattataaggacattatgacctgattacctcttaaaggacctgcctctcaacactattgcattggggattaagtatctaacacatgaactttggagacacattcaaaccatagcagtctctaacatcaacattcttcaccagcagcacatttattacaattaataacctacattggcatattgtagcactcaaaattcataatctgatggacttccctttgtcagtgacctgacctttctccctggctgcccttaatattttttcttccatttcgaccttggagtatgtgtcttggggttgatctactcatgaagtatcttattggggttctctggatttcctgaatttgaatattggcctgtcttgctaggttggggaagttctcctggattatatcctgaagtgtgttttccaacttggttccatcctccctgtctctttcaggtactccagtcagtggtaggttcggtctttttacatagtcccatagttcttggaagttttgttcatttcttttcattcttttttctctaatcttgtctgtctgccttatttcagcaagagagtcttcaagctctgatattttctcttctgcttggtcaattcagctattgatacttgtgtttgcaacatgatgttctcgtgctgtgtttttcagctccatcaggtcatttatgttcctctctgaactggttattctggttaacagctcctgtaatcttttatcatgcttcttagcttctttgcattgggttagaacataatgctttagctcagcgaaattcgttattaccaactttctgaagcctacttctgtcagtttatccatctcagcttcagccttgttctgtgccctcacaggagaactgttgcgatcatttggaggagaagaggcactctggcttttggaattttcaccgttttttcattgttttttcctcatcttcgtggatttatccacctttgatctttgagactgatgacctttgaatggggtttttgtggagtcttttttgtagatgttgttgttgttactttctgtttgtttgtttatcttctaacagtcagcctttctgaggcaagtctgctgcagtttgctggggatccactccagaccctgttcacatgggtatcaccagtggaggctgcagaacagcagattgctgcctgcttcttccttcagaagttttgccccagaggggcactggcctgatgccagccggaactcttctgtatgaggtgtctggtgacccttgttgggaagtctcacccagtcaggaggcatgggatcaaggacccgcttatgtagagaatctgacattcccttagcagagctggtgtgctgtgctgggggaatcccactcatcgggttcatctggtctcttcagagccagcaggcagaaaagataagtctgctgaacctgaaactgcctctcccctcaggttctctgactcagcgagatgagagttctgtctgtaagcccctgaccagagctgctggaattcttgcagggatgacctgcctggtgaggagggatggctcagggtcccacctaaagaggcagtctggccacaacctgccacagccagtttgctgcactgtgggaaatctggcccagtccaaacctctcaggctcctttgcactgtcaggggcaaaccgccaactaatggtggtcacccctccccccaggaacttagtcattccaggcacactccagactactctgctggcagcagggatctcaagccagtgggtcttagcttgcagggatccatgggagtagaacctactgattgagactgctgggctctcctccttggcttcagccccctttccatgggactggatggttctcgtgcctcactggagttccaggcaccactggagtatgtaaaaactcctgcagctcagtgcctgcctaaacagccaccaatgggagtggctgtcattggtttgcccaggtttgtgcttgagacccagggccctggtggtgtaggctcatgagggaatcttctgatctgcagattgcaaaaatctgtgggagaagcatagtacacctggtgggtaggacagaccctcgccacttcccttacctcagggaggcaagtctccccaccctgtgcagctcctgggtgaaatgacaccccacctgctttcttcctgcttcctgtgggttgcaccagctgcccaatgagatgaacttggtacctcagatggagatgcagaattcacctgccttccgcattcatctcactgggagcttcagaccagagctgtttctgtttggccatttgggcccctcccttcaagtatgttttcttttgtaagaaactgccaaagtggctgtagcatttcgctttcttaccagtaatgcatgagacttctggttgctccacatccttgctagtatttgatattgttaatgttttaatgtaacacttaagtaatatgtaatgatatctcattattttaacttgcaattctcaaaagacatatgatattaataatttgtcatttcattattttgattatgtcttttgcaggttgaaagtttttagttttaatgaagtccagtttatcagttctttctttcatggattgtgcctttggtattatatttaaaaagtcatcaccatacccaaagttatctaggctttctcttatattatcttctacgagttttacagttttgtgttttacctttaggactatgatacattttgagtcattttggggaaaaatgtaaaatctgggcctagattcatttatttgtatgtgggtgtctagttattcagcatcgttagttgaaaagactgtcttttcttaattgtattgctttgcttgtttatgaaagatcagttgactatatttatctgggtctatttctttttagtctgctactctgctttctatcctttttcattaatttatttgtctattccttttttttttttttttttaagagacggagtctcactctcttgcccaggccggagtgcagtggcgcaatctcggctcactgcaagctccgcctcctgggttcacccaccattctcctgcctcagcctcctgagtagctgggactacagacacctgccaccacgcccggctaatttttgtatttttagtagagacggggtttcaccgtgttagccaggatggtatagatctcctgacctcatgatccacctgccttggcctcccaaagtgctaggattacaggcgtgagccaccgcgcccagccttatttgtctgttctttaacaaataccacactgtcttgattactgtagttttagagtaaatcatgaagtcaggtagtatcagttgtttaactttgctcatctccttcaataatgtgtttgcttttctgggtcttttgcctatctatataaactttagaatcagtttgttgatatttatacaataacttgctgagattattattatcattgcatttaatctgtagattaagctgggaagaattgatatcttggcaatgttgagtctttctctccatgaacataaaatacttctccatttatttagttcttcattgatttccttcatcagtttgtagttttccacatatagattttgtatatattttgttagatttatacctaagtattttattttttgaatgataatgtatatggcactgtgttctcaattaaaagtccatttgtttatttctggcatatagaaaagtgattgacttttgtgtattagccatgcattctgcaaccttacatatcagtaaccttgcatgtcagttcccaaaattgtcaattattttggattttctacatagatgattatgtcatctgcagagaaatacagttttatttcttactttctcatctgtataccttttatttcctttatttccttttcttgtcttactgcattatctggtacttccagaacaatgttgtaaagtattggcgagagggacatctttgccttgtccttgatcttagtgggaaaacttcaagtttctcaccatacttgaggatgttagctgtaggttattgtagatattctttattaaggtgaagaagttcttccctatttctagtttactgggagtttttgtcacaaatctgtgttgaattttgtttactgaaagttatcacaaatgggcgttgaattttgttaatttttttgtatatattgatataatcaagtgattttttttagcttgttaatgttatggataacattaattgatttttgaatgttgaacctgccttaaatagctgaaataaatttaacttcatcacagtatataattctttttatacatcattggattggatttgctgatgttttgttaaggttttgcatctatgttcatgaggtatattggtccatagttttcttttcttgtgatgtcttaatctgattttcctattaggataaagctggcctcatagaatgagttaagaagtattctctcggctctaacttctaaaacaaattatagacaattggtataattttttccttaaatatttggttgaattcaccagtgagtccatcttgacatggtgctttctgttttggaaggtcaacttctgtaataaatgtaaacatatttaggtcatctatttctccatgtatgagtttagacaaattatgtctctcaagtgattgatcctctgtgtggacatagaactgtccattttagcatccatgggatctgtagtaacaactccttatttatttctgatatagataatttgtgtccttcctcttttcttcttaattagcctggctagagccttatccatttttttttttttaatctttcaaacctagtttttggttttgataacttttttctatcagtgtcccattttttatttctgctctaattatttcttttcttctgtttaatttgtacctgatttgctcttctatttctagtttcctaaggtgtaaacttagatcattaattttagatctttatttttttctaatagatgcattcaatactatcaatttctctttaaacaatgcttttactgcatcccacaaattttgttaagctgtattttcattttcatttagttgaagtattttaaaacttctattgtgatttcttccttgacccatatgttgtttagaaacgtattgtttaatctccacatgtttgtggagattagtgggattttaaaattttctttctgttattgactctagtttatttacattgtggtctgagagcagacgctgtatgatttctattttgttaaatttgttaggatatgttttggcccagaaggtggtctattatggtgattattccatgtaatcttgagagtgtgtattctgctgttgtttgacaaagtagtctatagatgtcaattatattcggttaattgatgatgttgctgagttcacctaagttctactgattttctgcctgctggatctgggcatttctttctttcttttttttttttttttttttattttgttgtttttgagacagagtctcgctctgtcacccagactggagtgcagtaatgcaatctcatctcatttcaaccactgcttcccgagttcaagcaatcctcccacctcagtctcctgagtagctgggaataccggcaaataccaccacacttggctcatttttgtctttttgtagagacagattttaccacattgctcaggttggtcttgaactcctgagatcaaataatccagccttttgggcctcccaaagtgctgagattacagtcatgagccaatataccctgctggatctgtgcatttccaatagagtgttgttgaaatctccaactatgataatgaattcatcgatttctccttgcagttctgttaatttttgcctcacgtagttaaatactctcttgttaggtgcgtgcacatttaggtttgttatgcggaaacataacatagtttcttggaaagctaattcttataccattatgcaatgcttttcttcattcctgataaatttccttgctttgaggtttgttctgtttgaaatttgtatagcttctcctgctttcttttgtttgtgccagtatgatataatacatatatatattcatgatccatttacttttaatttgtgtgtctttatatttaaagtgcatttcctgcagacatcatatagtttaatctctgatttttaattggtgcatttagatcattgatattaatgattattaatataggtggattaaatatctaccatatttctttctgttttctatttgttgcctttgttctttgtttctatttttgtttttcattctcttcttttcagagactgagtctcattctgttcattaggctagagtgtggtggtataatcatagctccctgtacccttgaaatcctaggctcaagtgattctcctacctgagccctgagtacctggtattacgggcatgtgccacaaagcctggctaatttttatttaatttttgtagcgacagagtctttgctacgttgcccaggctggtcttgaacttctggcctcaaatgatcctcctgcctcagtgtctcaaagggttgggattataagtgtaagctacaacacccagccatgtcttccatttttttcctgcatttttagtttttaacttagcatttataaagttccatattttctcattcttagtatatcaattatactttaaaaatgtgattttagtggttaccctagtgtttgcaatatacactcacaactaacataagtttgctttcaaataatactataccatttcacaggtactgtgagtaccttataataaaaaaatctaattctctgcttttatcccatgtgtcatttctgttatttattttatttacatgtaagaatacataagcatataaatatatataaaagatgtatacataagcacacataattaaatatattgctactattgttattttgaacaaactgccatttgttagatcaattaagaataagaaaaatagttttattttaccttcacttattttttatattgttcctttttcatataatttaggtttctaacctgtataattctctttccttttaaaataattgcatttaacttttttgttttttgatataagacaagtctactggcaacaagttatctcaatgtttctccaaaatagtggttgtttctcattcactttgaagaatttttttggctaaagaattctaagttgataaggttttttctcttaatactttaaatatttgtttccactgtcttcttgcttgcatggtttttgagaagaatgtaaatgtcatttttatctttgtttctctacatgtagaatttattttcctctggattctcttatgatttcttaaatctttgataaagggggtacaggggcatatgtgaactctatatttttaattcagtatttctgtcaacttaaactgataaaaactaaaatctattgattaagacaaatatcttgggaaacatcaatgtaaagcttgctgatctctctagtgttggggggaatgttggagaaaaatatgcctatttagctaaggacaaacctagataaattaactagaggtgtgaattgtatgcaagagattgtgtcagaacagggttccaataatgaacttcataagaggttttagataacctaagacattttgaaatataacacaactacaggaaattatacaatacaaatatgtagcttgattaattattataagataaacacctttgttgactcctgatatggcctagctgtgtctttacccaaatctcatcttgaattgtagttctcataatccccacttgtcatgggagggacccagtgggagataactgaatcatggagttggttaccctcgtgctgttcttgtgatagcgagtgagttttcatgatatctgatggttttataaggggcttttacccctttgttaggcacttctgtctcctgctgccatgtgaagaagaacacgtttgcttcctcttccaccattattgtaagtttcctgaggcctccccagccatgtagaattgtgagtcagttaaacttctttcctttttaaattatccagtcttgggcagttcttcatagcagtgaggatggactaatacaactgctaacattgtctaagaaagatccttgttatgtggctcagaggccctccatgtattcttaactattcactctcctatccttccaagaataacactaatttgacctctacaataatcactttatcactccagttttgccttttttcctccaaaacaatgccttttaagtctattttaatcgatagatttcctcttaatatcatttaaaaatatttctttacatttttagacaggaatcagaataatttgctatgttgaatttccagttacttggattttgttgatttcattcctgtggtttagttgacatgaatctctccaattgaaagggtaacttgaatatggtagctggaaagttaaaatcaattcttttaactttggaaaatgattaaattctggagatagaatagtaagttcataagatgacaggtcatttgcatcctctagtgaaaagcgaaggaattaaataaaaataacattttgatgcttaatgtttctggcagtattatgtctgtatttaattgttaaaatgtttttcaataattttttccaggttgtctgcattcaaaagagcattctattaaagctaccttaatttggcgcttatttttcttaatcatgtttctgacaatcatagtgtgtggaatggttgctgctttaagcggtaagtgaactgtaatctttattcatctagagagaattatacttgtaaaaagaagaggaagaatctgaataattttgttattctttacagcttttaatatattgtctcactaactgagttacactccaataactttttaagtggcaccaaaaattttaattatgtaaatagggttcacattattccaagtttagtgagatgatcagagtcttcagaaggtagaagacagaccactattccttaagaatattgatgcaaaaattaaaaaaaatagtaaactgaaaaatagtctcttgtccgatctaggaacatggttaattttacctccacaacaaccttgtttcatgaaaaatagcaaaacagatggtttaaagtacacaaaactactaagtggctgtataacatcacaggcagcctgttctttcttcctagctatttgagcatgttctggcccttgttttttttagcatatgtagcccatcttcctagaaaacaaactccgtttagtgattgtaccctaaaagcaattagctataaaaattatcttgtacttcaaaacatgcttgcagtgcatctaatatagaccaagcgaagacatagaaaactacaaaagcacttcccccaaacctcatgccaatctggatatcaacctaaaatctaccccctgttactacattctgaagtaatttcagagagacccttcaaatactgcttacgtaacttaagagtcagcaatacttggagcactccatataacactctaaataatttctattcatttgcaaatcttttgcttattatcttttggcattttgaaaccacagataatatactttatacatttatgaagcaaaaataatttttttatttcagagatttaagtcaactaattgtaactatttaagaaagaaaaaattggaaagagacaatttctgtactctgtaagtacctcagtattaatcaagggaatgtattctgaaatataatttaaatttatagctcttttttttacagtaagcatatgaaattgacacttatgactgttttcctttattatccattatgtgtttctcttcctttcagctagcactttggaaatgatttcttgtgtggagccaatagctggagccatcttctaatctggtcattttctttctttctttttttaaatgtgttattatgtattactttatatcatttttatgttttatttaacatttagattgttagttaactattcaagtgtggtatttccccatttaaatcgagttatttagattggctttagttataaaaattcctaatagagctttgtagttatagctctggtccctaactttttttttaaattatactttaagttctgggataaatgtgcagaacccgcaggttcgttacataggtatacacgtgccatggtggtttgatgcacctatcaacccatcatctatattaggtatttctcctaatgctatccctcccgttgccccccaaccctcaacacgcctcagtgtgtgatgttccgctccctgcatccatgtgttctcattgttcagctcccacatatgagtgagaacctgcagtatttggttttctgttcctgtgttagtttgatgagaatgatggtttccagtttcatttgtctccctgcaaagaatatgaactcattcttctttatggctgtatagtattccatggtgtatatgtgccacattttctttatccagtctatcattgatgagcatttgggttggttccaagtctttgctattgtgaatagtgccacaataaacatacgagtgcatgtgtctttatagtagaatgatttataatcctttgggtatagacccagtatttctggttatagatccttgaggaattgccacactgtattttccaaaatggttgaactaatttacactcccaccaacagtgtaaaagtgttcctatttctctacatcctcttcagcgtctgttgtttcctgactttttaatgattgtcattgtaactggcatgagatggtatctcattgttgttttgatttgaatttctctaatgatcagttatgatgagctttttatcatatatttgttggccacataaatgtcttcttttgtgaagtgtctgttcatatcttttgcccattttttgatagggttttttgttttattcttgtaaatttttttaagttccttgtagattctagatattagctgtttgtcaaacggatagattgcaaaatttgtctcccattctgtaggttgcctgttcactctgatgatagtttgttttttttgtttgtttgtttttttttttttttgtgcagaagctctttagttaaattagatcccgcttgtcaatttttgcttttgttgcaattgcttttggtgttttaatcataaaacctttgcccatgcctgtgtcctgaatggtattgcctaggttttgttctcaggtttttatggttttaggtcttatgtttaagtctttaatccatcttgagctaatttttgtgtaaggtgtaaggaaggggtccagcttcagttttctgcatatggctagccagttttctcaacaccatttattaaatagggaatcctttcccccattgcttgtttttgtcaggtttgtcaaagatcagatggttgtagatgttgggtgttatttctgaggcctctgttctgtccattggtcaatatatctgttttggtaccaacaccatgctgttttggttactgtagccttatagtttaatttgaagtcaggtagcatgatgcctccagcttagttctttttgcttaggattgtcttggctatacaggctcttttttggttccatatgaaatttaaagttttttttttttttaattctgtgaagaaagtcaatggtagcttgatgggaatagcattcaatctataaattactttgagctatatgactattttcataatattgattcttcctatctatgagcatggaatgattttccatttgtttgtgtcatctcttatttccttgagcagtgatttgtagttctccttgaagaggtccttcacatctcttgtaagttgtattcttaggtattttattctcttagtagcaattgtgaatgggagttcactcatgatttggctctctgtttgtctgttattggtgtataggaatgcttgtgatttttgcacattgatttcgtatcctgagaatttgctgaagttgcttatcagcttaataagttttaaggggatgagacaatggggttttctaaatatacaattctgtcatctgcaaacagagataatttgacttcctctcttcctgttgaatacactttctttctttctttcttttacctgattgccctgactagaacttccaatactatattgaataggagtggtgagagagggcatccttgccttgtgccagtttacaaagggaatgcttccagcttttggccactcagtatgatattcgctatgagtttgtcataaatagcttttattattttaatgtatgttccatcaatacctagtctattgtgtgtttttatcatgaaggggtgttcaattttatcaaaggccttttctgcatctattgagatcatcatgtggtttttgtcattggttctgcttatgtaatggattacatttattaatttacatatattgaaccagactttcatcccagggatgaaactgacttgatcgtggtggataagcttttgatgtgctgctggattcggctggccagtattttattgaggatttttgcattgatgttcatcaggaatattggcctgaaattttcttttttgttgtatctctgctaggttttggtatcaggatgatgctggtctcatataatgagttagggagaattccttctttttctattgtttggaataatttcagaaggaatggtaccagctcctcttcgtacctctggtagaattcggcagtgcatttgtctggacatgggcttgttttggttgggtaggctattaattactgcctcagtttcagaacctgttattggtctattcaggaatctgatttcttcctggtttagtcttgggagggtgtatgtgtccaggaatttatccatttcttccttgcctgggtatcaccagcaaaggctgaagaaaagcaaagattgctgcctgctccttcctctggaagcttcatcccagaggggcacgcaccagatgccagctgagctgtcctgtatgaggtgcctatcaacccctgctaggagttgtctcccagtcaggaggcatgggggtcagggacccacttgaaaaggcagtctttccctcagaagagctcgagcactgtgctgggagatccactgctcttttcagagctggctggcaggaatgtttaagtctcctgaagccgtgaccacagccaccctttcccccaggtgctctgtcccagggagataagagttttatctataagcccctgactggggctgctgcctttctttcagagatgccctgcccagagaggaggaatctagagaggcagtccggctgcagtggctttgctgcactggctttgctgcactgtggtgggctccgcccagtccgaacttcccccagggctttgtttacactgtgaggggaaaatcacctactcaagcctcagtaatggcggatgcacctcccctcaccaagcttgagcatctggggtccacttcagactgctgtgctggcagcaagaatttccagccagtgggtcttagcttgctgggctctgtggggattggacccactgagcaagaccacttggctccctggcttcagccccctttccagcagagtgaatgattctgtctcagtgggttccaggctccactggggtatgaaaaaaactcctgcagttatcttggtgactgcccaaatcgccacccagttttgtgcttgaaacccagggttctggtagtgttggcactccagagaatctcctggtctgtgggttgcaaaaaccgtgggaaaagcgtagtatctgggccagatagcacctcacagcacagtccctcacaacttcccttggctaggggagggagttctcccaccccttgtgcttcctgggtgaagcagcgccccaccctgcttctgcttgccctctgtgggctgcacccacttgtgtaaccagtcccagtgagatgatcctggtacctcagttggaaatgcagaaatcacctgccttctgcattggtctcactgggaactgcagaccagagctgtttctaatcagccatcttgccctctctggtctggtcgttttctttaaattggttgatacaggagcagtgatagcacaacaaatatgcacagatttggggaaagtcatcctgccttatggtctggttcaagaaattacattttaatagttataatttggtatcaccttgtttgtgataccaaaccagatacaatacacgtttgcctcatgttatgatttgttattcagattacaccagttattattcataactaagagtgatttctcatctcacaagagccaaatccaaggataatggtgccaattgatagtaatgattctatgaatacccagcattctggtctatcatagacactttcagaaccattgagttgaaggtagaaggtggttatataatagaagatgaactggtagctactaggggctcagtgacaactatctggagagacattcattcatctcgatcccacatgaagagagcatttctcctgattatataagaagtgggtcagaaaagcctgtccagtgaagtattgctgccttcaaagtgtagaaaacctcactacatctccttagtggaaggaagttcactgtacaacaacttatttcatatttatgatagtatttagacatatacaaggctttttcacatcaagaaaccttattcacataaggcatctctatcctgcccttcattttaccaagtcatctggagcagcaatcgccaaccttgttggcatgagggaccagttttgtgaaagacaacgttttcatggactggggtcaaggaatggtttggggataatttaagtgcattacttttattgtgccctttatttccattattattacattgtgtaataatatataataaaataattatacaactcaccataatgtagaatcagtgggaaccctgagctagtttttctgaaagtagatggtaccatctgtgagtgatgggagacagtgacagttcatcaggtattagattctcacaaggagcccacaacctagattcctcacatgagaagttcccaatagggtttgccctcctatgagaatctaatgccactgctgatctgacaggaggtggagctcatgaggtaatgtgagtgatggggagtggctgtaaatacagatgaagcttcacttactcattcgctgcttacctcctgctgtgcagcctgcttcctgactcatccatggaccagtactgatccatggcctaggggttggggacccctaatctagagcacttggagaactatctgttctccaaagctgatcaaatgctatcattaatgtatctaatattttaagaaagggtaacactgttgagagccaaatagatacatggcccagagcaagcttaagttactaataactcctttttcagctcaccccctgctgaaggcatgagtttgaatctcagttttgccatttgctgtgtaatgtatgcaattatatttagcatcatatttctcacttgaaaaatgaaaataatacatttaatacttaacaggagtgtcagaaagtatattagcacttggtaatttatacaatacaatataaaagtaagaaatttttattttatttatttttattttattttcagcaataagagctaactgccatcaagagccatcagtatgtcttcaagctgcatgcccagaaagctggattggttttcaaagaaagtgtttctatttttctgatgacaccaagaactggacatcaagtcagaggttttgtgactcacaagatgctgatcttgctcaggttgaaagcttccaggaactggtaagaaaatagttctggccagaatcaaagattcagccctacaaggatatgttttcctgtgaaattatctaagaggtaggtttagacatctgcttttacattgattttttttttttttttttttgcataacgaaagagtaacctagcatgtattatattttacagtgaaccatctaaaattaccttaatattcgtggcaggaacaggcccagagggcaagcaagccagagccttctttgacttgtgagccagaattgtgcaaataaggattagaaaagtattggtagaaacccagttttaagtttgtatgaagttagcaacattgtttcaaaataaatcaaacaaggccaagagcagtggcacatgcctgtaatcccagcactttgggaggccaaggcgggtgtatcacttgaggtcaggagtttgagatcagcttggccaacatggtgaaaccccatctcaactaaaaaatacaaaaattagctgggcatggtggcatacgcctgtagttccagctactcaggaggctgaggcagcagaattgcttgaacctgggaggtggaggcctacagttagctgaaatcatgctactgtactccagcctaacagagtgagactctatctcaaaaaaataataaaataaaaacaataagtcaagcaagaatgatgtcatagagattggtagactaaaaagctacagaaatctgttcctccactgagaaaactattgaactgtcaaaaactgtctgaagtaactattttggaattctcgagtctagttaaacactggaagcatcaagggaagagtttgataaagaggatgataaattttggttaatgttggtgaatttcagcctttccactcaataataactattttccataccccattattgcagggatccatgggaactgctgcccatgttcttgtaatgaattcctgcagccagggtgaacaataagcacctttttgtccaaatatcagggttattgctgatttctgcctttgaatgctgaggggcagacacagaagtgggctatcattacatcagtcctcatcagctgaagtggcttcccaaggatttaaataaatagtatgtgtttttcctccctttaggaagcagtcatttaagacaatttttattagataactggctgacagcagagataacagaacagagatttcaatgaccatgcacaacagagaataaaaatagttgggaaaaaatcatgaccaaatgactctgagccacaacaaccaagatttgacaatccctgaagagcaaaataattaagttaccagagttaccacaacatggtactcataatgtccagttctcaaaaaaaaattacaaaacatgcaaagaaaagtatggttcattcacaggaagaaaaagtaatctgacagaaactatccctgaagaggctcagatattaaaaatatgagtcaaaaatgttaaatcagctgtcttaagtataaccaatgagttaaaggaaactagacaaaaagctaaaggaaaccgaaaacataataaatgaacaaaattagaatatcaatataaaggtagaaattgtaaaaaagaaccaagcaaaaattccagagctgaaaagtacaatgactgaaatttaaaaataattttaaaaactcaatgaagaagttcaacagcagatttgagaagtaagagatcagaaaacttgaaaataagataattgaaacaatccagactaagaaaaacaaagaaaaagaatgaagataaataaattctaaggaacctgtaggacatcagcaaacatactaacatatgtactgtagaaatccaggaaagagaagagaaagagaagcagagaaatacacttaaagaaataatgaacaaaactttccaaaatctgaggaaatacataaatatatacatccaagaggctcaatgaactccaaaagggtaaacttaaagagatctacattgagacaaaatatagtcaagttgacaaaatccacagagagaattttgaaagcagccagaatgaagcaactcatcatttacataagaccctgaataaaattaatagctgattttctctgagaaaccatggagatcagaaggtagtggaatggcatatttaaatgtctgaaagaaaaaataaaactgccaaccatgaattctatgtatagcaaagttgtccttcaagaatgaaggaaaaagtaacacattttcagataaccaataattaagggattttattaccagtagacatgtgctacagaaaatgctaaaggaaaccttttaggctgaactgaaagtacactagacagcaattcagagcctccaaaataaagaatattcataaaagtaacaatagaggtaaatataaaacccagaattactacatgtgtcatatagtttataacttctcctatttatagctttctatatttatatttatctataacttcataggcaaatgaataaaaattataaatatgatagtggtcatataatgtataaagatgcaatctgtgacagtcttatgaagcagggatgaagacatataggatcaaaatgtttgcatagttattgaagctatgttgatattatgaaattatattgttacaagtttaagatgctaattataattctcaaggtaaccactaataaaattaccaaaattatgcagaaaaggaaaaaagaaaaacaatacactataaaaaaccaattaaatacaaaaaatgtcagtaacagacaacttgagaaacaaagacatataagatatagagaaaacaaatgattaaatggcaaaagtaaatcttgttttagtaatcacattaaatagaaaaggatgaagccatcctattaaagggctgagactgacaagttggctaaaaactaaaataaattaaaaagaaaaacaagactcatctacatgctgtctataagagacttgccttagatataaggacacaaagaagttgaaagtaaaaggactgaaaaagatattccatacaaacagtagtaaccaagatagtgccgagtggctatatttttgtcaaacaaaataaactaaagtaaaatttacaagagaaaaagaagggcattatgcattgacaaaaattttgacatagccaaataattatctgttataaaatatatgtacttaataatacagcctcaaaatatatgaagcaataattgctataatttaagggagaaaagaacagttctatgaaaagttagagaatgaaatattccactttcaacatgagattaaacaactagacataagatcaataaggaaatagaaaatttgaacaacactataaaccaattatccctaacaggcatatacagaagaatctacccaacaagagcagaatattaattcttctcaaatgcacatggaacattcttaaaaataaaccatatgttaggccacaaaacaagtgttagtaagtgtgaaaatttgaagtcataaaaagtatcttttgcaattacaatggaatgaagctagaaatcaataactagaaaaaccagaaaagtcacgcatatgtagaaatttaaaaacctgctcttcaacagccattggtcaaagaagaaatcacaagggacattagaaaataccttgagacaaatgaagtaaaaatacaaatagcacgtttatggtatacactgaacatagttctaagagggaaatttatagctgtgagcagttaactaaaaaagaagaaagatctcaaatccatagcctaactgtacactgtaaggaactaaaaaaagtaaaacaaaaatagaagtcatctttatgatttgaaagagtaaaagatttacctaataagtccctaaatttactaataataaagaaaattgtttatatatttaattgcgttaaaattcagaacttgtaatcatgaaaaggacagtacacattgacaaggaaacacagcaaaggaaaccagcctatgctgctgctgttgtgaggataatttggtacacttacattagtttggtgtcttttctttctctctctttctttctttctttctctttctttcgttcgttcgttcattcgtttctttttgagacagaatctcactctattgcccaggctggagtgcagtggcgtgatcttggctcactacaacttttgtctcccaggttcaaatgattctcatgcctcagcctcccaaatagctgggattataggtgcatgccatcacgcccagctaatttttgtattttttttaatagagagggggcttcatcatgttggccaagcctagtctcaaactcttggcctcaggtgatccgcctgcctcggcctcccaaagtactgggattacaggtgcctggcctggtggtgtcatttcttaaagttgacaaaaagcatatcctggggcctaaaaattctattctaggacaggtgccaagaatgtcatagtagcatacattccaaacttgataaaaccctggtgtcaaccgatagtataatagataaattggagaagagtcatacaaaggagtacaatacagaaacaaaagtaaccaaattatcaacaatttctctcagttttaaattatcttcttttgatatgtatgataatatagcacacctattctgtatgtattactaaacaatacaaaatcaaaaggaagaaaattatgagtagttaagaatatagcatagcagcaacatttctgggagaggatgggttatgttagattaatgaatatcatctctgtgttttctgaaagaatttcctgttgagatataaaggcccatctgatcactggattgggctgagcagagaacaaggccaaccatggaaatggataaatggtactgaatggacaagacagtaagttctaaaaatctggcagtaatatttgtatttgaatttactttgcattaaatctgaagtgttctctagttacatgctttaaaaaattctcattttaaggttagtcatgaaagaagatggtgccaacttgtatgttgcaaaggtttcacaagttcctcgaatgaatccaagacctgtcatggtgaggtagactgactgtgaacttggctccaggcttatctatgtcattttcaaacactttcattttaagcaaaccatacaatatctttaagtctgttccttacctccacaacaaaattaaattgcacttgtcctcctgatttcacagggttgatgtgaggaacagaggttttgatgtatcagggaaagattatgagtgacagcaattatacctattatttaaaataagacaatagttttaaaattttaaaatgggtaaagtttggcactagaaaatttaatctcaattgtatatttataggatcttcagattactaaaaagatttgagataatgctggaaaaattggattcacacaatttcactcaatgtttgtctgagagatgagacagttttgaaaagctactttattgtaatacattcatcaatattggaaatataactttatttaataaaaagagccccagactggacattggcaggtttgaaatgagttttttctcattagcttttgaccttggatgggatggtaagttttagaaatcagagaacatgtacatttatacattgttgtatctacactgccttgcacattgtgactgcttcataaatatctagaattaacttttatttcttattttacaatacggaagtagtaaattttctctacctaattcttaaaatggttttttgtttgtttgtatttttgagagacagggtcttactctgttacccaggctggagtgcagtagtaccatcgtggctcactgcagccttgacttccctggctcaagtgagcctcccatctcagcctcctgagtagctgggactacaggtgtgtgccaccttgcttggctttttttttttttttttttttttcagcgatggggtctcactatgttgcctgggctgatcttgaactcctgagctcaagcaatcctcccacctcggcctcccaaaatgttggaattacaggtgtgagccaccatgcctggcctctcaaaatattttaaggatcaaatatattattaactaaccagtttttggaaactgctcatcacttaaagaaatgtaaaatattatatgattaaggtctaacaagtttcaacaattagcaaattatatcatagatgatagtgattccaatgagcaaagaggaaaaatttataatccaaatgctgacctaaaatatctgtgccaagccatctaaactcagctaaatagcactgcagtttcagtactaaaaccaccagggaagtaggaggaataaaatcaagcatggtttttagaaatagctgctgagtcttcagttatttaaggaagcaaaatattgggaaactgtgtaaagaaaacgtgtcagacttctcccatcagccagctaaggctttggatgtacttgaaagaatattatgcttacagacatgaaataggtttgattcaggactttgcagtattcctatagttgatttataacatctcctgctaagcaaagcccactgactaattagtcaccactacacaaggaaaaacagcattatttttagaggctgaattaatgttagttttctcattttctcatcttcattctctctgctgttgaagaaatgttcagtggccaactgattctgcttcttctcttgcaggtttcctatcctgggagcaggagagtgtgcctatttgaatgacaaaggtgccagtagtgccaggcactacacagagaggaagtggatttgttccaaatcagatatacatgtctagatgttacagcaaagccccaactaatctttagaagcatattggaactgataactccattttaaaatgagcaaagaatttatttcttataccaacaggtatatgaaaatatgctcaatatcactaataactgggaaaatacaaatcaaaatcatagtaaaatattacctgttttcatggtgctaatattacctgttctcccactgctaatgacatacccgagactgagtaatttataaataaaagagatttaattgactcatagttccacatggctggggaggtcttgcaatcatgacagaaggcaaatgggaagcaaagtcatgtcttatgtggtggcaggcagggggacttgtgcacaggaactcctatttatacaaccatcagatatcttgagacaagaacagtatggggctccctggtgtgattccgtcctgcgcggctgttctctggagcagcattcatttatcttcgtctgccttgtctcctacctaagtgtgtgtcgccacccgatggaagattcgatggacatggacatgagccccctgaggccccagaactatcttttcagttgtgaactaaaggccgacaaagatgatcactttaaggtggataatgatgaaaatgagaccagttatctttaagaacggtcagctcaggggctggtgcaaaggatgaactgcacattgttgaagcagaggccatgaatgacgaaggcagtccaattaaagtaacactggcaactttgaaaatgtctgtacagccaacggtttctcttgggggctttgaaataacaccaccagtggacttaaggttgaagtgtggttcagggccagtgcatattagtggacagcacttagtagctgtgaaggaaggtgcagagtcagaagatgaagaagaggaggatgtgaaactcttaagtatatctggaaagcagtctgcccctggaggtgggcagaaaaaagtaaaacttgctgctgctgctgctgatgatgatgatgaagatgatgatgatgatgatgacgaggaagctgaagaaaaagcgccagtgaagaaatctatacgagatactccagccaaaaatgcacaaaagtcaaatcagaatggaaaagactcaaaaccatcatcaacaccaagatcaaaaggacaagaatccttcaaaaaacaggaaaaatctcctaaaacaccaaaaggatctagttctgtagaagacattaaagcaaaaatgcaagcaagtatagaaaaacgtggttctcttcccaaagtggaaaccaagttcatcaattatgtgaagaatttcttctggatgactgaccaagaggctattcaagatctctggcagtggaggaagtctctttaagaaaatagtttaaacaatttgttaaaaattttccatcttatttcatttctgtaacagttgatatctggctgtcctttttatagtgcagagtgagaactttccctaccatgtttgataaatgttgtccaggttctattgccaagaatgtgttgtccaaaatgcctgtttagtttttaaagatggaactccaccctttgcttggttttaagtatgtatgggatgctatgataggacatagtagtagcagtggtcagacatggaaatggtggggagacaaaagtatacacgtgaaataaaactcagtattttaataaagtaaaaaaaaaaaaaaggtatggggaaaactgcccccataaagcaattgtctccacctggccctgccctttgcatgtggagattattacaattcaaggtgaaatttgggtggagacacaaccaaaccatatcagatggctatatcaaaaagacaagaaataacaagcattggtgagagtgtggagaagacggaacccttgtacacagttggtgggaacacagtttggtgcagccattatagaaaacgtcatggaggttcctaaagaaattaaaaagagaactaccatatgagccagcaatcccttttccagatatacacccaaaggaaatgaaatcaccacctcataaagatatctgctttcctgtttattataacacatctttattcataatagccaagatacggaactaactgaagtgaccattaacagatgaatggataaagaaattgtcatatatataaaacacacacattatatacatacatacatatatatatataaaaaaatagaatattattcagccttgtaaaaagaaatcctgttatgttgggaacaagccccccaaaatctggccataaactcaccccaaaactggccataaacaaaatctctgcagcactgtgacatgttagtgatggccataacacccacgctggaaggttgtgggtttatgggaatgagggcaaggaacacctggcctgcccagggtggaaaaccacttaaaggcgttcttaagctacaaacaatagcatgagcgatctgtgccttaaggacatgttcctgctgcagttaactagcccaatctattcctttaattcggcccatcccttcatttcccataagggatacttttagttaatttaatatctatagaaacaatgctaatgactggcttgctgttaataaatacatgggtaaatctctgttctgggctctcagctctgaaggctgtgagacccctgatttcccacttcacacctctatatttctgtgtgtgtgtctttagttcctctggcgctgctgggttaggatctacccaactgagctggtctcagcactgttatttgaaacaatgtaaataaacctatagggtttattatatatactaagtgaaataagccagacacagaaaaaaaatgttgcatgatctcacttatagtgaaacttaaaaaaaaacccaaatacatagaaatagagtagaatggtggttaccagagatgaggaaaatacagagacacaggtcaaaagatacagagttgcagttacaaagggtgagtatgtctagatatctaacatacagtatgaggactataatagtattgcactgtgtactgaaaacttgatgacagattttagatattcttaccacacagacaaaaagaaatgtaagtatgtgagatgaagcttatgttaattagattaagtgtatgtacataaaaacatcacattatacacatcaaatatatacaataaaaaagcacattgggagatacatgataaatttctatctgcagttgctatttgcatttttaaaggatatttttattttttaaatttttagctgacaactgtataattatggaatacaatgtgatgttctgatatatgtgtacactatggaatgattaaatcaaactaacatttcatcatctcacatacttatcattttctgtggtgagaacatttgaaatttattctcttgacaattttgaaagatccaatacactattattaactatagtcactatgctgtgcaatagatctcaaaagcttattcctcttaactgaaacctactaccctgtgacatgtggggaacatctctctattccccagccccagtccctaaatgttgaatacacaatggggaaaaaatagtcttcaatgaatggtggtgggaaaattgtatatccacatgcagaagaataaaattggacccttacctcctaccatatataaaaaccaactgaaaatcgattaaagacttaaactgtaaaactactaaaagaaaatatagggagaaagcttcacaacgttggtctgggcaataatttttggatttgacctcaaaagtagatgcaaccacagtgaaaataaacaaatgaaattgcataaaataaaaaatgtttctgcacagcaaaggaaataattaatggagtaaagagacaacttacagattgggagaatatatttccaaactattgttggggctcagaaacggataccctaacatatagtgatttgacaggtggaactaaagaagactcgaggtctctctgacctcctcctcaacctctgtttcttaatcctctgttttcccagagcacaggaggaagttctctgaagttcctttatctgctttaagttcagactcaccaaataagaaaacagttaattctggtgccttccatgggttttcattaactgaagtcatattgtaggaaaaagaatgaagtctcttaacccacctggatagatttttctcacaaaccattgtcttctctgcaagcccagtagactttgtcccaggccatttatgtgatcttcaccccattaagttctccccaaattatttactcttcccccaaaatcacccacacttccccatctccctctcccctaaggacaagggtatatcaccatctataccccattgcttggtggggtgatcactctgatttctctgcatgcatttttatagatttgtttgccatttatcctattaatctgcattctgtcaattgtggcaagttatcagcgtattttttaacttttaattattcttaatggaaagacacttctgtatacactggaaatctcaggaaatttcttttttccttaagcttaattgaaatgtttacttttcagtaaaatttcaagcttgagtaatgttcatgcctgcttttcattgaaatagaatgaaaaggttgcacaatattattttcatgaaattacttctagtataattctgaataaacactttgaaaggcagtgaactgtaaatatattacagctatctcttattcttcagggtgggtctcaattatgtaaaagatgattggctttctgttttaagtaatagtcattttgaaaacactttaaaactgtcaagtgaagtgtgatggctaattttatatgtcaacttgactgagataaggtatactcagcagggaaagcattatctctggatgtgtctatgagggcttttctgaaagagattgatgttggaatcactaagctgtgtaaagatgatctaccttcaccaatgttggcaggcatcatccaatccgtgcaggtcttacccaaacagagcaaaaagtcaggtagggtaaatttattctcttctaaagctagggcatccatttctttctactctcagacattggagttccccagtttcccagacctttggccttacactgagaattatgctttgttttatttaggcatattttaataatacttcatgtattggtcaggaagacatttcctggttctaaggctttcgactcagactagattacaacactggctttcctggttctctagcttgcagaagagaatactaggaagcttgtacttcctacataggtaagaagaggaaactaaatctctggcttataaactatgtaaccaaccacaattcacaaagattccataatttccttggcaggaggctaagatctaaagcccaatatgattgtacttctcttatcagttttctgcaaacaaaagagaatagaactaaaatacagctttgttaaaataatgttgattcatttgcatgaaatatcagatcacagaaacaacatatttttataaaatatgagctctgtcacactggccctcatagacacatccagagataatgctttccctgctgagtataccttatctcaatcaagttgacatataaaattagccatcacacttcacttgacagttttaaaattaggttgttttttccaaatgacaaaaagcaggagcaaactgcaagtgctcctgcaacacatctaacaagaaagccttatctgacttttatgaggttcagtataatgcccaaactgcatatttcaaactcttgccatcagattcacctaagaagacaaaagatctattgcctttgaacctacattcccaaagcgtgcaacatgaacttgcctacatccaaggggtaggaccttcttacgtagtgaattcccaaagtgttgctgaaattatgaacagtgctctgcctcatactgacaagtgaaacctctatctctgattgcccaaaaatgtctaatgaagctatagcatcactacaatttggaatagacacttaatccagaattgaagagatatagataaaaatgaactgagtgcaatgccaagagataggataaatatggccccctccaaaaaaagatcctaagtccatgacaatggtgctagagatttctcacaaaactccaaggagtaaaacaagaaactataaagacagatggagaaccacatgttatggtgcatcatataaacaacgaagagatggtagtcaattgtgtaagaatcttgaagttgttgggttcaaataaagagaattatgaaatgaaataagtatccaattaacacaggaaataatatgaacaatggggttaggagaacagagatcaatgtaagagatgtttccaaaagtaatgatgttgtcatggaagttggcagatgatcaaattatcaggtatgtaaaactgatcatgaaggtgttccaaggaaattactctaattgtttcatcaatattgaacccaaaattaaatcaacacaaacatagaaaaggaaaaaaaaaaaaaggcaaaaggcacagtgtaatgatgctctctttactcctttggaagggattgataaaattgcaactacttcttgtataaagaatcatccattttatagatgactacaaattcaatcctaaaccttcaaatacaatgaaaagaaagtatgtactgagagctggaatgactactcacctaggccaaactctcacctaggaatgaagcatcaggcacacagtgcactgagcatggctgaaggtgcattgactaatcttctaaaacctactccagaatgagagagactggtacaactccatttgtgctaaatttggagatataaacaatattttggagttaaaacctagaagttttcaaatctacataaaaaatcaatttcttttttttcttgcaaaagcagaaaagatgagaggacattggcacctgccaagagtgttgatgaaatggggtacttccctggcctctttgcaggagttgcaaaggggttggcttgtttactcagcccacagctctcaacccctcatgggaggggaaactcacaggtgagtgggtgtagggatcaggatgagggcttctgtgtgccagcaggagtagaactctgtgctgccccatggcaacatctaggggagttcccatgacccctcaagccccagagggtgagtgttacagtgtgctcttttagcttttctatccacagatgacttaagtatttaacagctcagtggagggtcagggtgacagccttttggacctgccttcttggtacctcagttcttgtttagcgtccaggaagaatcaggtcatgcaaacaaattgaagggtagtgaatgtggaggattttattgagggatggaagtggctctcagcgggatagggagctggaaagtggatggaatgggaaggtggtattcccctggagttcagacaaactcttctccgaggtcccaccatcaagctgtccctctgagctcaaactgcttctctctgacatccggctgcttcttcttttctttctttctctgtcactctgctattccgctgctctgctgctctgccactctggtgatggggcctgtggtttttatgggtagaggatggggtgtggggtgggccaaaaagcaacatgtgagtgggaaagcaggaaatgcatgttctcattttggtctgtgatcccaggcttgaggatgtgtggctcttgcttgggacagccctcttctgcccagtatttccctgcttcccacccatatcaccaacactgctcctaaccctactcaaaaggtacattaaaatatagaggtggaaagttatatgctgcttctctcagagcaaaccctttctctcttatgtaaaataactaactttcctccacagcataatttaaaaagaaaactaatgatgacattagtcagaaatctgtagacatctctactcctctagtaactctgaaaactgggtctgctaatgagttggtagcattaaatctgaagactgaaagttttctattctgttccttctctttttacccttactttagtggaacagtaaatttcagtaaaatcagtgaaggtgtatctgccaaggttccaatcaacacagaggaagagaagacttgttctataactaaactagtagacaacccagaaaaattatctctacttataataaacagaaatcctaattactgcatccaactacctgaccatcattcatttttaagagacagaatttttaacgttccaaagttctcacccaaaagagatctgacagtttctgactgcactccattctggagaagttgctactaaattgaatagagtaaagttattgttcctttaaatacaatatctatgaatggacaatcaagatttatgtcccttaaggcataagacagctgttaaatgttgttcctccattgtactaatcaacttcatactactggaggatatttgtaaaaaatatttatatatacacacatacacacacactcttaaaataatttgtgctaggttatttatttatttatttatttatttatttatttattgagacaaggtctcactctgttgctcaggctggagtgcagtggcatgatcatagctcactgcagcctcagcttcccaaactctggcgatcctctcacatcagcctcccaagcagctgggaccacaggcatgtgccattatacctgactaatttttgaattttttgtagagacagagttacaccgtgttgccaaggctggtctcaaaattttggggtcaaacaatctacctgccttggtctttcaaagtgcttggattatagttgtgagccactgagctcagcctgtcctaggtcttttaatgtcaaaagaacacttgcccgcatatatatatatatgtatacatatttgtcatttctttgtcttaaaactggaatatcctgctttaaaactttaagacaaagtgtaaatgattttctttttttaatgagaaatagtcaccttttgtcaattttatttgctgattttattgacttgcgtattctacagtggagacctcaacatattctatgtattgtgttttagtagcaaggtgaacatatgtatgatattttccaccttaatgttactctttaattgaatacatttataagttacattaaagcttattttatgttgaaagaaggagctagaaaactagtgatgttaaacaatgtgttaacatttattttcaatgatgaatcatttagtttacaagacatatcttgtattttctttaggtaattgccaaatcagagtcaaatttatggtaagttcatagtactttaatattttattaatatgaaatacttgatttttacattcttagaattttaattgcgcaaggagaacttccaataaatattttctgtatataattatgacactttcttcacaaatattacatattctatgctccaaggccttgaacaatttcttgtgaaaatgttgctgcattgtcacagttatttcacaattttcatatagagaggaatagggattaagttatgttcatttgctttttttaacttttaagttcagagatacatgtgcaggatttgtagatttgttacataggtaaacacatgtcatggagatttattgtacagattattttatcactcaagtattatgcctagtatccattattttttaaattctctccctcctttcaccctctgctgtttggtaggcccccgtttttgttatttccctctaggtatctatgtgttctcatcatttagctctcacttacaagtgagaacatgtggtatttgattttccattcctgtgatagtttggtaagaataatggcatctagttccatatatgtctctgcaaaggacatgatcttgttcctttttatggctgcatagtattccatggtgtatatgtaccacattttctttatccagtctatcgttgatgggcatttaggttgattttgtgtctttgctattgtgaatagtgctgcaatgaacatatgtgtgcgtgtgtagttattatagaacaatttatattgctttgggtatacgcccagtaattggattgctgggtcgaatagtagtgctgtctctaggtctttgagaaattgccatactgtcttccacaatggttgacctaatttacactcccaccaacaatgtaaaagcattcctttttcaacacaaccttgccaacatctattattttttgactttttaataatagccatctgactggtgtgggatggtgtctcattgtggttttgatctgcatttctctaatgatcagtgatattgagctttttttcatataattgttggccacatgtatgtcttcttttgagaaatgtcttttcatgtcctttgcttactttttaatgaggtcttttttttttgtaaatttgtttaagttccttataagtgctggatattagatcattatcagatgcatgaattacaaaaattttatcccattctgtaggttgtttactctgttgatagtttctcttgctgtgcagaagatctttagtttaattagatcccatttgtcaatctttccttttcttacaattgcttttggcatcttcgtcatgaaatatttgcctgtgtctatatcctgaatgttattgcttaggttttcttctatggtttttatagttttgggttttacactaaagtctttaatccatcttgagttgatttttgtatatgatataaggaagggtcccagtttcaattttctgcatatggctagccagttctcccagcactatttacaggggaatcctttcccattgctcatttttgtcaggtttgtcaaagatcagatggttgtaggtgtgtggtcttatttctgaattctctaatctgttccattggtctatgtgtctgttgttgcactggtaccatgctgttttggttactgtagccttgtagtatagtttgaaattgggtagtgtgatgcctctggctttgctgtttttgcttaatattattcaggctattcaggctcttttttattccatataaattttattccatataaattttaaaataggtatttttctattgaatctgtaagttgcattgggaagtacggccattttcaagatcttgattcttcctatgcataagcatggaatgtttttccatttgtttgtgtcttctctgatttctttgagcagtggtttgtacttctccttgaggaagcccttcacttttcttgttagctgtattcctaggtattttgttctctttgtagcaattgtgatttggctctctgcttgcctgttgctggtgtgtaggaatgctagtgatttttgcaaattgattttgtaacctgagactttgctgaagttgcttctcagcttaagaagcttttgggctgagatgatgggactttccaaatatagaatcatgtcatctgcaaacaaagacaattttacttcctctcttcctctttgaatatgctttatttctttcccttgcctgattgcccaggccaaaacttctaatactatgttgaaaaggtgtagtgagagaggttatccttgtcttgtgtcagtcttcaaggggaattctttgagcttttgcccatttaatatgatattgactgtagatttgtcatatatgactcattattttgatgcctgttccttaaacaccaggtagattgagagtttttaacatgaagggatattgaattttattgaaagccttttctgcatttactgagataagcatgtggtttttgtctttagttttatttatctgatgaattacatttattggttggtgtatgttgaaccaaccttgcatcccaaagatgaagccgacttgatcgtggtgaataagcttttcaatgtgctgctggattcagtttgtcagtattttgttgagaatttttgcatatgatcatcaaggatattggcctgaagttgtctttttgtttgtatttctgccaggttttggtatcaggatggtgctgccctcatagaatgagttagggagaagtcacttctttcaagtttctgaaatagtttcagtaggaatggtaccagcttttct

SEQ ID NO: 996 - DNA, 2706 bp, Homo sapiens
accgatgaatgggattagtgcccttacaaaaggggcccaccaaagctgccttgttccttctactatgtgaggacacatctagaagttaccatcaatgaaccagaaagtgggccctcaccaggcaccaaatctgccagcactctgatcttggacttccagcctcctgaactgttgtctgcattcaaaagagcattctattaaagctaccttaatttggcgcttatttttcttaatcatgtttctgacaatcatagtgtgtggaatggttgctgctttaagcgcaataagagctaactgccatcaagagccatcagtatgtcttcaagctgcatgcccagaaagctggattggttttcaaagaaagtgtttctatttttctgatgacaccaagaactggacatcaagtcagaggttttgtgactcacaagatgctgatcttgctcaggttgaaagcttccaggaactgaatttcctgttgagatataaaggcccatctgatcactggattgggctgagcagagaacaaggccaaccatggaaatggataaatggtactgaatggacaagacagttagtcatgaaagaagatggtgccaacttgtatgttgcaaaggtttcacaagttcctcgaatgaatccaagacctgtcatggtttcctatcctgggagcaggagagtgtgcctatttgaatgacaaaggtgccagtagtgccaggcactacacagagaggaagtggatttgttccaaatcagatatacatgtctagatgttacagcaaagccccaactaatctttagaagcatattggaactgataactccattttaaaatgagcaaagaatttatttcttataccaacaggtatatgaaaatatgctcaatatcactaataactgggaaaatacaaatcaaaatcatagtaaaatattacctgttttcatggtgctaatattacctgttctcccactgctaatgacatacccgagactgagtaatttataaataaaagagatttaattgactcatagttccacatggctggggaggtcttgcaatcatgacagaaggcaaatgggaagcaaagtcatgtcttatgtggtggcaggcagggggacttgtgcacaggaactcctatttatacaaccatcagatatcttgagacaagaacagtatggggctccctggtgtgattccgtcctgcgcggctgttctctggagcagcattcatttatcttcgtctgccttgtctcctacctaagtgtgtgtcgccacccgatggaagattcgatggacatggacatgagccccctgaggccccagaactatcttttcagttgtgaactaaaggccgacaaagatgatcactttaaggtggataatgatgaaaatgagaccagttatctttaagaacggtcagctcaggggctggtgcaaaggatgaactgcacattgttgaagcagaggccatgaatgacgaaggcagtccaattaaagtaacactggcaactttgaaaatgtctgtacagccaacggtttctcttgggggctttgaaataacaccaccagtggacttaaggttgaagtgtggttcagggccagtgcatattagtggacagcacttagtagctgtgaaggaaggtgcagagtcagaagatgaagaagaggaggatgtgaaactcttaagtatatctggaaagcagtctgcccctggaggtggtgctgctgctgatgatgatgatgaagatgatgatgatgatgatgacgaggaagctgaagaaaaagcgccagtgaagaaatctatacgagatactccagccaaaaatgcacaaaagtcaaatcagaatggaaaagactcaaaaccatcatcaacaccaagatcaaaaggacaagaatccttcaaaaaacaggaaaaatctcctaaaacaccaaaaggatctagttctgtagaagacattaaagcaaaaatgcaagcaagtatagaaaaacgtggttctcttcccaaagtggaaaccaagttcatcaattatgtgaagaatttcttctggatgactgaccaagaggctattcaagatctctggcagtggaggaagtctctttaagaaacagttgatatctggctgtcctttttatagtgcagagtgagaactttccctaccatgtttgataaatgttgtccaggttctattgccaagaatgtgttgtccaaaatgcctgtttagtttttaaagatggaactccaccctttgcttggttttaagtatgtatgggatgctatgataggacatagtagtagcagtggtcagacatggaaatggtggggagacaaaagtatacacgtgaaataaaactcagtattttaataaagtaaaaaaaaaaaaaaggtatggggaaaactgcccccataaagcaattgtctccacctggccctgccctttgcatgtggagattattacaattcaaggtgaaatttgggtggagacacaaccaaaccatatcagatggctatatcaaaaagacaagaaataacaagcattggtgagagtgtggagaagacggaacccttgtacacagttggtgggaacacagtttggtgcagccattatagaaaacgtcatggaggttcctaaagaaattagaaatgaaatcaccacctcataaagatatctgctttcctgtttattataacacatctttattcataatag

SEQ ID NO: 997 - protein, 208 aa, Homo sapiens
MNDEGSPIKVTLATLKMSVQPTVSLGGFEITPPVDLRLKCGSGPVHGQHLVAVKEGAESEDEEEEDVKLLSISGKQSAPGGGAAADDDDEDDDDDDDEEAEEKAPVKKSIRDTPAKNAQKSNQNGKDSKPSSTPRSKGQESFKKQEKSPKTPKGSSSVEDIKAKMQASIEKRGSLPKVETKFINYVKNFFWMTDQEAIQDLWQWRKSL

SEQ ID NO: 998 - DNA, 2628 bp, Homo sapiens
accgatgaatgggattagtgcccttacaaaaggggcccaccaaagctgccttgttccttctactatgtgaggacacatctagaagttaccatcaatgaaccagaaagtgggccctcaccaggcaccaaatctgccagcactctgatcttggacttccagcctcctgaactgttgtctgcattcaaaagagcattctattaaagctaccttaatttggcgcttatttttcttaatcatgtttctgacaatcatagtgtgtggaatggttgctgctttaagcgcaataagagctaactgccatcaagagccatcagtatgtcttcaagctgcatgcccagaaagctggattggttttcaaagaaagtgtttctatttttctgatgacaccaagaactggacatcaagtcagaggttttgtgactcacaagatgctgatcttgctcaggttgaaagcttccaggaactgaatttcctgttgagatataaaggcccatctgatcactggattgggctgagcagagaacaaggccaaccatggaaatggataaatggtactgaatggacaagacagtttcctatcctgggagcaggagagtgtgcctatttgaatgacaaaggtgccagtagtgccaggcactacacagagaggaagtggatttgttccaaatcagatatacatgtctagatgttacagcaaagccccaactaatctttagaagcatattggaactgataactccattttaaaatgagcaaagaatttatttcttataccaacaggtatatgaaaatatgctcaatatcactaataactgggaaaatacaaatcaaaatcatagtaaaatattacctgttttcatggtgctaatattacctgttctcccactgctaatgacatacccgagactgagtaatttataaataaaagagatttaattgactcatagttccacatggctggggaggtcttgcaatcatgacagaaggcaaatgggaagcaaagtcatgtcttatgtggtggcaggcagggggacttgtgcacaggaactcctatttatacaaccatcagatatcttgagacaagaacagtatggggctccctggtgtgattccgtcctgcgcggctgttctctggagcagcattcatttatcttcgtctgccttgtctcctacctaagtgtgtgtcgccacccgatggaagattcgatggacatggacatgagccccctgaggccccagaactatcttttcagttgtgaactaaaggccgacaaagatgatcactttaaggtggataatgatgaaaatgagaccagttatctttaagaacggtcagctcaggggctggtgcaaaggatgaactgcacattgttgaagcagaggccatgaatgacgaaggcagtccaattaaagtaacactggcaactttgaaaatgtctgtacagccaacggtttctcttgggggctttgaaataacaccaccagtggacttaaggttgaagtgtggttcagggccagtgcatattagtggacagcacttagtagctgtgaaggaaggtgcagagtcagaagatgaagaagaggaggatgtgaaactcttaagtatatctggaaagcagtctgcccctggaggtgggcagaaaaaagtaaaacttgctgctgctgctgctgatgatgatgatgaagatgatgatgatgatgatgacgaggaagctgaagaaaaagcgccagtgaagaaatctatacgagatactccagccaaaaatgcacaaaagtcaaatcagaatggaaaagactcaaaaccatcatcaacaccaagatcaaaaggacaagaatccttcaaaaaacaggaaaaatctcctaaaacaccaaaaggatctagttctgtagaagacattaaagcaaaaatgcaagcaagtatagaaaaacgtggttctcttcccaaagtggaaaccaagttcatcaattatgtgaagaatttcttctggatgactgaccaagaggctattcaagatctctggcagtggaggaagtctctttaagaaaatagtttaaacaatttgttaaaaattttccatcttatttcatttctgtaacagttgatatctggctgtcctttttatagtgcagagtgagaactttccctaccatgtttgataaatgttgtccaggttctattgccaagaatgtgttgtccaaaatgcctgtttagtttttaaagatggaactccaccctttgcttggttttaagtatgtatgggatgctatgataggacatagtagtagcagtggtcagacatggaaatggtggggagacaaaagtatacacgtgaaataaaactcagtattttaataaagtaaaaaaaaaaaaaaggtatggggaaaactgcccccataaagcaattgtctccacctggccctgccctttgcatgtggagattattacaattcaaggtgaaatttgggtggagacacaaccaaaccatatcagatggctatatcaaaaagacaagaaataacaagcattggtgagagtgtggagaagacggaacccttgtacacagttggtgggaacacagtttggtgcagccattatagaaaacgtcatggaggttcctaaagaaatta

SEQ ID NO: 999 - protein, 216 aa, Homo sapiens
MNDEGSPIKVTLATLKMSVQPTVSLGGFEITPPVDLRLKCGSGPVHGQHLVAVKEGAESEDEEEEDVKLLSISGKQSAPGGGQKKVKLAAAAADDDDEDDDDDDDEEAEEKAPVKKSIRDTPAKNAQKSNQNGKDSKPSSTPRSKGQESFKKQEKSPKTPKGSSSVEDIKAKMQASIEKRGSLPKVETKFINYVKNFFWMTDQEAIQDLWQWRKSL

SEQ ID NO: 1000 - DNA, 2582 bp, Homo sapiens
accgatgaatgggattagtgcccttacaaaaggggcccaccaaagctgccttgttccttctactatgtgaggacacatctagaagttaccatcaatgaaccagaaagtgggccctcaccaggcaccaaatctgccagcactctgatcttggacttccagcctcctgaactgttgtctgcattcaaaagagcattctattaaagctaccttaatttggcgcttatttttcttaatcatgtttctgacaatcatagtgtgtggaatggttgctgctttaagcgcaataagagctaactgccatcaagagccatcagtatgtcttcaagctgcatgcccagaaagctggattggttttcaaagaaagtgtttctatttttctgatgacaccaagaactggacatcaagtcagaggttttgtgactcacaagatgctgatcttgctcaggttgaaagcttccaggaactgaatttcctgttgagatataaaggcccatctgatcactggattgggctgagcagagaacaaggccaaccatggaaatggataaatggtactgaatggacaagacagtttcctatcctgggagcaggagagtgtgcctatttgaatgacaaaggtgccagtagtgccaggcactacacagagaggaagtggatttgttccaaatcagatatacatgtctagatgttacagcaaagccccaactaatctttagaagcatattggaactgataactccattttaaaatgagcaaagaatttatttcttataccaacaggtatatgaaaatatgctcaatatcactaataactgggaaaatacaaatcaaaatcatagtaaaatattacctgttttcatggtgctaatattacctgttctcccactgctaatgacatacccgagactgagtaatttataaataaaagagatttaattgactcatagttccacatggctggggaggtcttgcaatcatgacagaaggcaaatgggaagcaaagtcatgtcttatgtggtggcaggcagggggacttgtgcacaggaactcctatttatacaaccatcagatatcttgagacaagaacagtatggggctccctggtgtgattccgtcctgcgcggctgttctctggagcagcattcatttatcttcgtctgccttgtctcctacctaagtgtgtgtcgccacccgatggaagattcgatggacatggacatgagccccctgaggccccagaactatcttttcagttgtgaactaaaggccgacaaagatgatcactttaaggtggataatgatgaaaatgagaccagttatctttaagaacggtcagctcaggggctggtgcaaaggatgaactgcacattgttgaagcagaggccatgaatgacgaaggcagtccaattaaagtaacactggcaactttgaaaatgtctgtacagccaacggtttctcttgggggctttgaaataacaccaccagtggacttaaggttgaagtgtggttcagggccagtgcatattagtggacagcacttagtagctgtgaaggaaggtgcagagtcagaagatgaagaagaggaggatgtgaaactcttaagtatatctggaaagctgctgctgatgatgatgatgaagatgatgatgatgatgatgacgaggaagctgaagaaaaagcgccagtgaagaaatctatacgagatactccagccaaaaatgcacaaaagtcaaatcagaatggaaaagactcaaaaccatcatcaacaccaagatcaaaaggacaagaatccttcaaaaaacaggaaaaatctcctaaaacaccaaaaggatctagttctgtagaagacattaaagcaaaaatgcaagcaagtatagaaaaacgtggttctcttcccaaagtggaaaccaagttcatcaattatgtgaagaatttcttctggatgactgaccaagaggctattcaagatctctggcagtggaggaagtctctttaagaaaatagtttaaacaatttgttaaaaattttccatcttatttcatttctgtaacagttgatatctggctgtcctttttatagtgcagagtgagaactttccctaccatgtttgataaatgttgtccaggttctattgccaagaatgtgttgtccaaaatgcctgtttagtttttaaagatggaactccaccctttgcttggttttaagtatgtatgggatgctatgataggacatagtagtagcagtggtcagacatggaaatggtggggagacaaaagtatacacgtgaaataaaactcagtattttaataaagtaaaaaaaaaaaaaaggtatggggaaaactgcccccataaagcaattgtctccacctggccctgccctttgcatgtggagattattacaattcaaggtgaaatttgggtggagacacaaccaaaccatatcagatggctatatcaaaaagacaagaaataacaagcattggtgagagtgtggagaagacggaacccttgtacacagttggtgggaacacagtttggtgcagccattatagaaaacgtcatggaggttcctaaagaaatta

SEQ ID NO: 1001 - protein, 149 aa, Homo sapiens [sequence omitted]

SEQ ID NO: 1002 - DNA, 2025 bp, Homo sapiens
gtttcctatcctgggagcaggagagtgtgcctatttgaatgacaaaggtgccagtagtgccaggcactacacagagaggaagtggatttgttccaaatcagatatacatgtctagatgttacagcaaagccccaactaatctttagaagcatattggaactgataactccattttaaaatgagcaaagaatttatttcttataccaacaggtatatgaaaatatgctcaatatcactaataactgggaaaatacaaatcaaaatcatagtaaaatattacctgttttcatggtgctaatattacctgttctcccactgctaatgacatacccgagactgagtaatttataaataaaagagatttaattgactcatagttccacatggctggggaggtcttgcaatcatgacagaaggcaaatgggaagcaaagtcatgtcttatgtggtggcaggcagggggacttgtgcacaggaactcctatttatacaaccatcagatatcttgagacaagaacagtatggggctccctggtgtgattccgtcctgcgcggctgttctctggagcagcattcatttatcttcgtctgccttgtctcctacctaagtgtgtgtcgccacccgatggaagattcgatggacatggacatgagccccctgaggccccagaactatcttttcagttgtgaactaaaggccgacaaagatgatcactttaaggtggataatgatgaaaatgagaccagttatctttaagaacggtcagctcaggggctggtgcaaaggatgaactgcacattgttgaagcagaggccatgaatgacgaaggcagtccaattaaagtaacactggcaactttgaaaatgtctgtacagccaacggtttctcttgggggctttgaaataacaccaccagtggacttaaggttgaagtgtggttcagggccagtgcatattagtggacagcacttagtagctgtgaaggaaggtgcagagtcagaagatgaagaagaggaggatgtgaaactcttaagtatatctggaaagcagtctgcccctggaggtggtgatgatgatgatgaagatgatgatgatgatgatgacgaggaagctgaagaaaaagcgccagtgaagaaatctatacgagatactccagccaaaaatgcacaaaagtcaaatcagaatggaaaagactcaaaaccatcatcaacaccaagatcaaaaggacaagaatccttcaaaaaacaggaaaaatctcctaaaacaccaaaaggatctagttctgtagaagacattaaagcaaaaatgcaagcaagtatagaaaaacgtggttctcttcccaaagtggaaaccaagttcatcaattatgtgaagaatttcttctggatgactgaccaagaggctattcaagatctctggcagtggaggaagtctctttaagaaaatagtttaaacaatttgttaaaaattttccatcttatttcatttctgtaacagttgatatctggctgtcctttttatagtgcagagtgagaactttccctaccatgtttgataaatgttgtccaggttctattgccaagaatgtgttgtccaaaatgcctgtttagtttttaaagatggaactccaccctttgcttggttttaagtatgtatgggatgctatgataggacatagtagtagcagtggtcagacatggaaatggtggggagacaaaagtatacacgtgaaataaaactcagtattttaataaagtaaaaaaaaaaaaaaggtatggggaaaactgcccccataaagcaattgtctccacctggccctgccctttgcatgtggagattattacaattcaaggtgaaatttgggtggagacacaaccaaaccatatcagatggctatatcaaaaagacaagaaataacaagcattggtgagagtgtggagaagacggaacccttgtacacagttggtgggaacacagtttggtgcagccattatagaaaacgtcatggaggttcctaaagaaatta

SEQ ID NO: 1003 - protein, 205 aa, Homo sapiens
MNDEGSPIKVTLATLKMSVQPTVSLGGFEITPPVDLRLKCGSGPVHGQHLVAVKEGAESEDEEEEDVKLLSISGKQSAPGGGDDDDEDDDDDDDEEAEEKAPVKKSIRDTPAKNAQKSNQNGKDSKPSSTPRSKGQESFKKQEKSPKTPKGSSSVEDIKAKMQASIEKRGSLPKVETKFINYVKNFFWMTDQEAIQDLWQWRKSL

SEQ ID NO: 1004 - DNA, 505 bp, Homo sapiens
accgatgaatgggattagtgcccttacaaaaggggcccaccaaagctgccttgttccttctactatgtgaggacacatctagaagttaccatcaatgaaccagaaagtgggccctcaccaggcaccaaatctgccagcactctgatcttggacttccagcctcctgaactgttgtctgcattcaaaagagcattctattaaagctaccttaatttggcgcttatttttcttaatcatgtttctgacaatcatagtgtgtggaatggttgctgctttaagcgcaataagagctaactgccatcaagagccatcagtatgtcttcaagctgcatgcccagaaagctggattggttttcaaagaaagtgtttctatttttctgatgacaccaagaactggacatcaagtcagaggttttgtgactcacaagatgctgatcttgctcaggttgaaagcttccaggaactggtttcctatcctgggagcaggagagtgtgcctatttgaa

SEQ ID NO: 1005 - protein, 90 aa, Homo sapiens
MFLTIIVCGMVAALSAIRANCHQEPSVCLQAACPESWIGFQRKCFYFSDDTKNWTSSQRFCDSQDADLAQVESFQELVSYPGSRRVCLFE

SEQ ID NO: 1006 - DNA, 2710 bp, Homo sapiens
accgatgaatgggattagtgcccttacaaaaggggcccaccaaagctgccttgttccttctactatgtgaggacacatctagaagttaccatcaatgaaccagaaagtgggccctcaccaggcaccaaatctgccagcactctgatcttggacttccagcctcctgaactgttgtctgcattcaaaagagcattctattaaagctaccttaatttggcgcttatttttcttaatcatgtttctgacaatcatagtgtgtggaatggttgctgctttaagcgcaataagagctaactgccatcaagagccatcagtatgtcttcaagctgcatgcccagaaagctggattggttttcaaagaaagtgtttctatttttctgatgacaccaagaactggacatcaagtcagaggttttgtgactcacaagatgctgatcttgctcaggttgaaagcttccaggaactgaatttcctgttgagatataaaggcccatctgatcactggattgggctgagcagagaacaaggccaaccatggaaatggataaatggtactgaatggacaagacagttagtcatgaaagaagatggtgccaacttgtatgttgcaaaggtttcacaagttcctcgaatgaatccaagacctgtcatggtttcctatcctgggagcaggagagtgtgcctatttgaatgacaaaggtgccagtagtgccaggcactacacagagaggaagtggatttgttccaaatcagatatacatgtctagatgttacagcaaagccccaactaatctttagaagcatattggaactgataactccattttaaaatgagcaaagaatttatttcttataccaacaggtatatgaaaatatgctcaatatcactaataactgggaaaatacaaatcaaaatcatagtaaaatattacctgttttcatggtgctaatattacctgttctcccactgctaatgacatacccgagactgagtaatttataaataaaagagatttaattgactcatagttccacatggctggggaggtcttgcaatcatgacagaaggcaaatgggaagcaaagtcatgtcttatgtggtggcaggcagggggacttgtgcacaggaactcctatttatacaaccatcagatatcttgagacaagaacagtatggggctccctggtgtgattccgtcctgcgcggctgttctctggagcagcattcatttatcttcgtctgccttgtctcctacctaagtgtgtgtcgccacccgatggaagattcgatggacatggacatgagccccctgaggccccagaactatcttttcagttgtgaactaaaggccgacaaagatgatcactttaaggtggataatgatgaaaatgagaccagttatctttaagaacggtcagctcaggggctggtgcaaaggatgaactgcacattgttgaagcagaggccatgaatgacgaaggcagtccaattaaagtaacactggcaactttgaaaatgtctgtacagccaacggtttctcttgggggctttgaaataacaccaccagtggacttaaggttgaagtgtggttcagggccagtgcatattagtggacagcacttagtagctgtgaaggaaggtgcagagtcagaagatgaagaagaggaggatgtgaaactcttaagtatatctggaaagcagtctgcccctggaggtgggcagaaaaaagtaaaacttgctgctgctgctgctgatgatgatgatgaagatgatgatgatgatgatgacgaggaagctgaagaaaaagcgccagtgaagaaatctatacgagatactccagccaaaaatgcacaaaagtcaaatcagaatggaaaagactcaaaaccatcatcaacaccaagatcaaaaggacaagaatccttcaaaaaacaggaaaaatctcctaaaacaccaaaaggatctagttctgtagaagacattaaagcaaaaatgcaagcaagtatagaaaaacgtggttctcttcccaaagtggaaaccaagttcatcaattatgtgaagaatttcttctggatgactgaccaagaggctattcaagatctctggcagtggaggaagtctctttaagaaaatagtttaaacaatttgttaaaaattttccatcttatttcatttctgtaacagttgatatctggctgtcctttttatagtgcagagtgagaactttccctaccatgtttgataaatgttgtccaggttctattgccaagaatgtgttgtccaaaatgcctgtttagtttttaaagatggaactccaccctttgcttggttttaagtatgtatgggatgctatgataggacatagtagtagcagtggtcagacatggaaatggtggggagacaaaagtatacacgtgaaataaaactcagtattttaataaagtaaaaaaaaaaaaaaggtatggggaaaactgcccccataaagcaattgtctccacctggccctgccctttgcatgtggagattattacaattcaaggtgaaatttgggtggagacacaaccaaaccatatcagatggctatatcaaaaagacaagaaataacaagcattggtgagagtgtggagaagacggaacccttgtacacagttggtgggaacacagtttggtgcagccattatagaaaacgtcatggaggttcctaaagaaatta

SEQ ID NO: 1007 - protein, 216 aa, Homo sapiens; identical to SEQ ID NO: 999

SEQ ID NO: 1008 - DNA, 2536 bp, Homo sapiens
cactcatagaaactggaggcaaaatgcatgacagtaacaatgtggagaaagacattacaccatctgaattgcctgcaaacccaggttgtctgcattcaaaagagcattctattaaagctaccttaatttggcgcttatttttcttaatcatgtttctgacaatcatagtgtgtggaatggttgctgctttaagcgcaataagagctaactgccatcaagagccatcagtatgtcttcaagctgcatgcccagaaagctggattggttttcaaagaaagtgtttctatttttctgatgacaccaagaactggacatcaagtcagaggttttgtgactcacaagatgctgatcttgctcaggttgaaagcttccaggaactgaatttcctgttgagatataaaggcccatctgatcactggattgggctgagcagagaacaaggccaaccatggaaatggataaatggtactgaatggacaagacagtttcctatcctgggagcaggagagtgtgcctatttgaatgacaaaggtgccagtagtgccaggcactacacagagaggaagtggatttgttccaaatcagatatacatgtctagatgttacagcaaagccccaactaatctttagaagcatattggaactgataactccattttaaaatgagcaaagaatttatttcttataccaacaggtatatgaaaatatgctcaatatcactaataactgggaaaatacaaatcaaaatcatagtaaaatattacctgttttcatggtgctaatattacctgttctcccactgctaatgacatacccgagactgagtaatttataaataaaagagatttaattgactcatagttccacatggctggggaggtcttgcaatcatgacagaaggcaaatgggaagcaaagtcatgtcttatgtggtggcaggcagggggacttgtgcacaggaactcctatttatacaaccatcagatatcttgagacaagaacagtatggggctccctggtgtgattccgtcctgcgcggctgttctctggagcagcattcatttatcttcgtctgccttgtctcctacctaagtgtgtgtcgccacccgatggaagattcgatggacatggacatgagccccctgaggccccagaactatcttttcagttgtgaactaaaggccgacaaagatgatcactttaaggtggataatgatgaaaatgagaccagttatctttaagaacggtcagctcaggggctggtgcaaaggatgaactgcacattgttgaagcagaggccatgaatgacgaaggcagtccaattaaagtaacactggcaactttgaaaatgtctgtacagccaacggtttctcttgggggctttgaaataacaccaccagtggacttaaggttgaagtgtggttcagggccagtgcatattagtggacagcacttagtagctgtgaaggaaggtgcagagtcagaagatgaagaagaggaggatgtgaaactcttaagtatatctggaaagcagtctgcccctggaggtgggcatgatgatgatgatgaagatgatgatgatgatgatgacgaggaagctgaagaaaaagcgccagtgaagaaatctatacgagatactccagccaaaaatgcacaaaagtcaaatcagaatggaaaagactcaaaaccatcatcaacaccaagatcaaaaggacaagaatccttcaaaaagacattaaagcaaaaatgcaagcaagtatagaaaaacgtggttctcttcccaaagtggaaaccaagttcatcaattatgtgaagaatttcttctggatgactgaccaagaggctattcaagatctctggcagtggaggaagtctctttaagaaaatagtttaaacaatttgttaaaaattttccatcttatttcatttctgtaacagttgatatctggctgtcctttttatagtgcagagtgagaactttccctaccatgtttgataaatgttgtccaggttctattgccaagaatgtgttgtccaaaatgcctgtttagtttttaaagatggaactccaccctttgcttggttttaagtatgtatgggatgctatgataggacatagtagtagcagtggtcagacatggaaatggtggggagacaaaagtatacacgtgaaataaaactcagtattttaataaagtaaaaaaaaaaaaaaggtatggggaaaactgcccccataaagcaattgtctccacctggccctgccctttgcatgtggagattattacaattcaaggtgaaatttgggtggagacacaaccaaaccatatcagatggctatatcaaaaagacaagaaataacaagcattggtgagagtgtggagaagacggaacccttgtacacagttggtgggaacacagtttggtgcagccattatagaaaacgtcatggaggttcctaaagaaattagaaatgaaatcaccacctcataaagatatctgctttcctgtttattataacacatctttattcataatag

SEQ ID NO: 1009 - protein, 191 aa, Homo sapiens
MHDSNNVEKDITPSELPANPGCLHSKEHSIKATLIWRLFFLIMFLTIIVCGMVAALSAIRANCHQEPSVCLQAACPESWIGFQRKCFYFSDDTKNWTSSQRFCDSQDADLAQVESFQELNFLLRYKGPSDHWIGLSREQGQPWKWINGTEWTRQFPILGAGECAYLNDKGASSARHYTERKWICSKSDIHV

SEQ ID NO: 1010 - DNA, 2542 bp, Homo sapiens
cactcatagaaactggaggcaaaatgcatgacagtaacaatgtggagaaagacattacaccatctgaattgcctgcaaacccaggttgtctgcattcaaaagagcattctattaaagctaccttaatttggcgcttatttttcttaatcatgtttctgacaatcatagtgtgtggaatggttgctgctttaagcgcaataagagctaactgccatcaagagccatcagtatgtcttcaagctgcatgcccagaaagctggattggttttcaaagaaagtgtttctatttttctgatgacaccaagaactggacatcaagtcagaggttttgtgactcacaagatgctgatcttgctcaggttgaaagcttccaggaactgaatttcctgttgagatataaaggcccatctgatcactggattgggctgagcagagaacaaggccaaccatggaaatggataaatggtactgaatggacaagacagtttcctatcctgggagcaggagagtgtgcctatttgaatgacaaaggtgccagtagtgccaggcactacacagagaggaagtggatttgttccaaatcagatatacatgtctagatgttacagcaaagccccaactaatctttagaagcatattggaactgataactccattttaaaatgagcaaagaatttatttcttataccaacaggtatatgaaaatatgctcaatatcactaataactgggaaaatacaaatcaaaatcatagtaaaatattacctgttttcatggtgctaatattacctgttctcccactgctaatgacatacccgagactgagtaatttataaataaaagagatttaattgactcatagttccacatggctggggaggtcttgcaatcatgacagaaggcaaatgggaagcaaagtcatgtcttatgtggtggcaggcagggggacttgtgcacaggaactcctatttatacaaccatcagatatcttgagacaagaacagtatggggctccctggtgtgattccgtcctgcgcggctgttctctggagcagcattcatttatcttcgtctgccttgtctcctacctaagtgtgtgtcgccacccgatggaagattcgatggacatggacatgagccccctgaggccccagaactatcttttcagttgtgaactaaaggccgacaaagatgatcactttaaggtggataatgatgaaaatgagaccagttatctttaagaacggtcagctcaggggctggtgcaaaggatgaactgcacattgttgaagcagaggccatgaatgacgaaggcagtccaattaaagtaacactggcaactttgaaaatgtctgtacagccaacggtttctcttgggggctttgaaataacaccaccagtggacttaaggttgaagtgtggttcagggccagtgcatattagtggacagcacttagtagctgtgaaggaaggtgcagagtcagaagatgaagaagaggaggatgtgaaactcttaagtatatctggaaagcagtctgcccctggaggtgggcagaaaaaagtaaaacttgctgctgctgctgctgatgatgatgatgaagatgatgatgatgatgatgacgaggaagctgaagaaaaagcgccagtgaagaaatctatacgagatactccagccaaaaatgcacaaaagtcaaatcagaatggaaaagactcaaaaccatcatcaacaccaagatcaaaaggacaagaatccttcaaaaaacaggaaaaatctcctaaaacaccaaaaggatctagttctgtagaagacattaaagcaaaaatgcaagcaagtatagaaaaacgtggttctcttcccaaagtggaaaccaagttcatcaattatgtgaagaatttcttctggatgactgaccaagaggctattcaagatctctggcagtggaggaagtctctttaagaaaatagtttaaacaatttgttaaaaattttccatcttatttcatttctgtaacagttgatatctggctgtcctttttatagtgcagagtgagaactttccctaccatgtttgataaatgttgtccaggttctattgccaagaatgtgttgtccaaaatgcctgtttagtttttaaagatggaactccaccctttgcttggttttaagtatgtatgggatgctatgataggacatagtagtagcagtggtcagacatggaaatggtggggagacaaaagtatacacgtgaaataaaactcagtattttaataaagtaaaaaaaaaaaaaaggtatggggaaaactgcccccataaagcaattgtctccacctggccctgccctttgcatgtggagattattacaattcaaggtgaaatttgggtggagacacaaccaaaccatatcagatggctatatcaaaaagacaagaaataacaagcattggtgagagtgtggagaagacggaacccttgtacacagttggtgggaacacagtttggtgcagccattatagaaaacgtcatggaggttcctaaagaaatta

SEQ ID NO: 1011 - protein, 216 aa, Homo sapiens; identical to SEQ ID NO: 999

SEQ ID NO: 1012 - DNA, 2595 bp, Homo sapiens
accgatgaatgggattagtgcccttacaaaaggggcccaccaaagctgccttgttccttctactatgtgaggacacatctagaagttaccatcaatgaaccagaaagtgggccctcaccaggcaccaaatctgccagcactctgatcttggacttccagcctcctgaactgttgtctgcattcaaaagagcattctattaaagctaccttaatttggcgcttatttttcttaatcatgtttctgacaatcatagtgtgtggaatggttgctgctttaagcgcaataagagctaactgccatcaagagccatcagtatgtcttcaagctgcatgcccagaaagctggattggttttcaaagaaagtgtttctatttttctgatgacaccaagaactggacatcaagtcagaggttttgtgactcacaagatgctgatcttgctcaggttgaaagcttccaggaactgaatttcctgttgagatataaaggcccatctgatcactggattgggctgagcagagaacaaggccaaccatggaaatggataaatggtactgaatggacaagacagtttcctatcctgggagcaggagagtgtgcctatttgaatgacaaaggtgccagtagtgccaggcactacacagagaggaagtggatttgttccaaatcagatatacatgtctagatgttacagcaaagccccaactaatctttagaagcatattggaactgataactccattttaaaatgagcaaagaatttatttcttataccaacaggtatatgaaaatatgctcaatatcactaataactgggaaaatacaaatcaaaatcatagtaaaatattacctgttttcatggtgctaatattacctgttctcccactgctaatgacatacccgagactgagtaatttataaataaaagagatttaattgactcatagttccacatggctggggaggtcttgcaatcatgacagaaggcaaatgggaagcaaagtcatgtcttatgtggtggcaggcagggggacttgtgcacaggaactcctatttatacaaccatcagatatcttgagacaagaacagtatggggctccctggtgtgattccgtcctgcgcggctgttctctggagcagcattcatttatcttcgtctgccttgtctcctacctaagtgtgtgtcgccacccgatggaagattcgatggacatggacatgagccccctgaggccccagaactatcttttcagttgtgaactaaaggccgacaaagatgatcactttaaggtggataatgatgaaaatgagaccagttatctttaagaacggtcagctcaggggctggtgcaaaggatgaactgcacattgttgaagcagaggccatgaatgacgaaggcagtccaattaaagtaacactggcaactttgaaaatgtctgtacagccaacggtttctcttgggggctttgaaataacaccaccagtggacttaaggttgaagtgtggttcagggccagtgcatattagtggacagcacttagtagctgtgaaggaaggtgcagagtcagaagatgaagaagaggaggatgtgaaactcttaagtatatctggaaagcagtctgcccctggaggtggtgatgatgatgatgaagatgatgatgatgatgatgacgaggaagctgaagaaaaagcgccagtgaagaaatctatacgagatactccagccaaaaatgcacaaaagtcaaatcagaatggaaaagactcaaaaccatcatcaacaccaagatcaaaaggacaagaatccttcaaaaaacaggaaaaatctcctaaaacaccaaaaggatctagttctgtagaagacattaaagcaaaaatgcaagcaagtatagaaaaacgtggttctcttcccaaagtggaaaccaagttcatcaattatgtgaagaatttcttctggatgactgaccaagaggctattcaagatctctggcagtggaggaagtctctttaagaaaatagtttaaacaatttgttaaaaattttccatcttatttcatttctgtaacagttgatatctggctgtcctttttatagtgcagagtgagaactttccctaccatgtttgataaatgttgtccaggttctattgccaagaatgtgttgtccaaaatgcctgtttagtttttaaagatggaactccaccctttgcttggttttaagtatgtatgggatgctatgataggacatagtagtagcagtggtcagacatggaaatggtggggagacaaaagtatacacgtgaaataaaactcagtattttaataaagtaaaaaaaaaaaaaaggtatggggaaaactgcccccataaagcaattgtctccacctggccctgccctttgcatgtggagattattacaattcaaggtgaaatttgggtggagacacaaccaaaccatatcagatggctatatcaaaaagacaagaaataacaagcattggtgagagtgtggagaagacggaacccttgtacacagttggtgggaacacagtttggtgcagccattatagaaaacgtcatggaggttcctaaagaaatta

SEQ ID NO: 1013 - protein, 205 aa, Homo sapiens; identical to SEQ ID NO: 1003

SEQ ID NO: 1014 - DNA, 25310 bp, Mus musculus
  misc_feature (1)...(25310): n = A,T,C or G
gagatgactcagcgggtaagagcactggctgctcttccagaggacgggggttcaattcccagcagcacctgtatagcagctcacaagtgtctctaagttcagttccaggggatccaacaccctcacagagacatacaaaacaccaatgcacataaaattttttaaaaagtcatttaaaagtaagaaaaaatctttttataaaaaaaagaaatgatagggtattttcctttgttctttgcacaaatgcgaacgtttctcccacgtgcttgtagaaggcgcctttcctgttaccagctggagccactgaaactgcacccgatgactgtttgcatcctttacccttggggggctgaacctcatacactgggttttttgccttcctgtggaaaatggcacttgcctaggaccccttagtctgagttagggtggccagcatcggggagaggagagcccaccttcttcctctctcttctcactccattgtgaaggtgaaccttcaggctccatcttgtaaataaatctctagtggccactctagactcacgatgatttcattacagtgaagcccgctggctggtcttgggtgggtaggtactagttgagacataggaggacaagaaccttatttatcctcttttccctaaaacccctgacgcagaatgagccatgtgtgaatgaatgagcatatatgcatgtgtatactcagccttgtgagtatttagggtctgttattgtagctgttaagatttacatattggaagctggggagatggctcagtggttacgaccactaactgctcttccagaggtcctgagttcaattcccagcaaccacatggtggctcacaaccatctgtaatggcatctgatgctgtcttctggcctgtaggtgtacatagagcactcatatacataaaataaataaatattttttttattgaccaggtagaggtggcacatgcctctaaccctagcttttgggaggcagaaacagatagatgtctatgagtttgaagtcagcctggtctacagagtgaattcaaggccagccagagatagagagaaaaaccctgtctcaaaacaaaacaaatttaaaaaaaacaaataaaaaaatcacaagaccaaataaaacaaaactaatatttatttattgttgttttcgtgtgtgtgtgtgtgtgtgtgtgtgtgtgtgcatgcaggtgactgaggaggccagaagagggagtcagatttcttcaagttgtagtttcaggtggttgtaagccactcaatgtgggtgctggtgactgaccctcaatcctctagaagagcagcgagcattttaaactctgctgctacgtcttcaacattattttgtaagtctcatatagcctggactggtcttgaattagtgaccaggatgttgaacctgttctagctgcctctacctcccaagcgctgggattaagacaggcaccatcatatccagttacttgtggtgctggaactggagcccaggacctcatgcacactaggcaagcctgctgccaaccagatgagctacatctctagccccttgtgttttgtgttttgagataaggtttcctgcaggcaggctggcttcaaatttaccgtgagggtgacctggaagtcttgattctcctgcctctacctcccaagttccgggattgccggagtgtggccattgcggatgtctagtgtttcttgtggtgtggatggagatgagtgggagagaagctgcatgtggggtgttcctacgtgtgtgcatgactgctcatgtactttatgcatggctgtgtgtttcagaggctcatgtctgagtgtgcacctatgtgtgcccctgtgtctgatatatatataccagcacatgtacgtatgttctgacggcgattacggcacacacggtgcaggtgtgcatcccattgtgtgccctgggtaagtctgaacataacggggcaatatctgcgtgcactgaactgtgcttggatctgagcaggctcccctaccctcagggcctcctcagctctcctcggttcaacctcattctttctgctgtttcactgtttccgtcctcgtctccagatgttgcaattaagcaaatgcagcaattaagcagagtcccccaaacagccatcccaccaggacccccttccaggaactaatgaggggttacaacacgtgcagacccacatggtccgatgcaggcacccagggaccccccccaggccgcacatgtgatggcgggaaggctcaggcgggctggacacacagagcaaggactccactgctcacttggacctctcttctaagtcttggtgcagtgatccctgattccaggaagccccccaggttcgggggtgggggttggggttgaggaggtcctgaactctgcttgtgagacttcgtgcccctctgcttccctagtcacagcctggaccattctgacccctgctttgtcactacaggcctcattgttttgccctggctttccctgtgcactaggaccttatcccaggctccagccttgctaagccaggtttctcccatcccggccctgatgactctgagctgcctgaagatatgacttctctcttctctctgggggtgttacttcatgaaaggcagctggacaatgacctgggctgtccaagtccttgctttaattgcagccttgtatcattagctttctctctagtgacctaacacttgaactgagagatagctcagcagttaggggcagcgggtgctaaaaggcagaaggcagatccaacctatgatgaccagccccagtgacctgcttacctcacccaggccccctttcttcgcttcaccaccttctaactgtctactcaagtacttggtattcctactaggtagctaccaactttctgaaactctagctcccagaatccaacaccttccctctgtcctctacaagtcacacacatggacacacacacacaaataaaagtaaaatcaaggtgtgatggagattgtggtcctcccttctcccccgggtcgttggctaccgcgcatgaggatgaagggaatagagttgacaaacagggtttcagacaaaccatgagcgtggatggaaatgatgacacttcagcatcagcttctgtaggacagatcaactttactccgggtgaatggagtgttatggagtgtgggggaagggagtaggagtatcctgggtgagtgaaggtcattggctgagattgtactgagatgtctcattaacatggggaggccttccaggaacctcaggtgcttgctgaacgggtttcttatagggagaaaggaagcggaacctgtaatctcaccaaggatgtatgactttctgcgggtagagaaatgggggtttcaagctccccagaaaagatcagagaaggagaagcactgttggtaaagggagtccaccattttgcactgagctcagggcttcctgatgatgtcagatttcggctttataatagcagagtttcccaacaagagatggttcagctgttataggcactggctgctcttgcagaagacccgggttctgttcccagcacccacactgtggcttacaccatttgtaactccagttccaggacatcaaaagcacacaagtggcgtgttcacgtgtatgcatgcagaggaaacacttgtacttaaaacttgtaaacacttgtaaaaacataaaacccttgtaaaataaaaataaatagatcttttaaaatgaaataagtttagagaaaagacgtaatttggctcatggtcttagagagctgagtatcttggccccatgtgtttcagcaaagcatcatggtggaaggaatattgattgacaggaagcaaagagagacagctcacattatggtggacaggaaacgtcagagctatagcaagaagggggagggcaggatacagcactggtgacaggcttccagtgacttacttcctccagtcatgcctcgactatcccttcctaatcatcccaccagatgattagtccattcattaaccaggaccaccaccaacacactaacctaatctcttatcggttcttttaaagacaggatctccaggatggactgggagtcactatgttgttcaggttggccttaaactttcagtagtctgcttacctcaggctctcaagtgctggaattacagatgttagccactgtagcttgataaattatttcttcttcttcctcctcctctcctcctcctcttcctcctcctcttcttcttcttccttctcctcttcctcctcctcctcttgggatcctcagagtgannnnnnnnnnnnnnnnnnnnnnnnnnnnnnnnnnnnnnnnnnnnnnnnnnnnnnnnnnnnnnnnnnnnnnnnnnnnnnnnnnnnnnnnnnnnnnnnnnnnnnnnnnnnnnnnnnnnnnnnnnnnnnnnnnnnnnnnnnnnnnnnnnnnnnnnnnnnnnnnnnnnnnnnnnnnnnnnnnnnnnnnnnnnnnnnnnnnnnnnnnnnnnnnnnnnnnnnnnnnnnnnnnnnnnnnnnnnnnnnnnnnnnnnnnnnnnnnnnnnnnnnnnnnnnnnnnnnnnnnnnnnnnnnnnnnnnnnnnnnnnnnnnnnnnnnnnnnnnnnnnnnnnnnnnnnnnnnnnnnnnnnnnnnnnnnnnnnnnnnnnnnnnnnnnnnnnnnnnnnnnnnnnnnnnnnnnnnnnnnnnnnnnnnnnnnnnnnnnnnnnnnnnnnnnnnnnnnnnnnnnnnnnnnnnnnnnnnnnnnnnnnnnnnnnnnnnnnnnnnnnnnnnnnnnnnnnnnnnnnnnnnnnnnnnnnnnnnnnnnnnnnnnnnnnnnnnnnnnnnnnnnnnnnnnnnnnnnnnnnnnnnnnnnnnnnnnnnnnnnnnnnnnnnnnnnnnnnnnnnnnnnnnnnnnnnnnnnnnnnnnnnnnnnnnnnnnnnnnnnnnnnnnnnnnnnnnnnnnnnnnnnnnnnnnnnnnnnnnnnnnnnnnnnnnnnnnnnnnnnnnnnnnnnnnnnnnnnnnnnnnnnnnnnnnnnnnnnnnnnnnnnnnnnnnnnnnnnnnnnnnnnnnnnnnnnnnnnnnnnnnnnnnnnnnnnnnnnnnnnnnnnnnnnnnnnnnnnnnnnnnnnnnnnnnnnnnnnnnnnnnnnnnnnnnnnnnnnnnnnnnnnnnnnnnnnnnnnnnnnnnnnnnnnnnnnnnnnnnnnnnnnnnnnnnnnnnnnnnnnnnnnnnnnnnnnnnnnnnnnnnnnnnnnnnnnnnnnnnnnnnnnnnnnnnnnnnnnnnnnnnnnnnnnnnnnnnnnnnnnnnnnnnnntgtttcccctggacttccccctcccccttcctcttccccctctccttcccttctccttcttcttcttcttcttcttcttcttcttcttcttcttcttcttcttcttcttcttcttcttcttcttcctcctcctcctcctcctcctcctcctcctcctccttcttcttcttctttgcactggctgttctggaacttgccaagtatttccagactgaccttgaactcaaaaagattctcctgcctctgccttccaagtgctgggactaaaggtaaatggcaccacacctggcttatttactttgagtcgggatttatgaggtctgggctttaaacagtaatcttccttccttagtcttctgagtgctggtattacaggtctgtgccctcacacctagatctcaggaaacattttcttttaaaaataaaggtttatttttattcctttttggtgttttgttattttattcttatgtgggtgttttgcctacatgtgtgtatgtgcaccatgtccatgcctggtgcccgcagaggccagagagggcatctgatccctgagtgctgggatccaaactgagtcctccacaaaagcagcaagtgtttctaccctcggagccatcctttagtccctcatgagcatttccaaatccaatcagattaacgctcaaaactgaccatcacaagtgttacctaccgtaatgatggccagacaaccacagtaactgccgagctaataatggcggcctccttgcctctgtctccctgctcctggcatgtgttcctggcatcccctgcaccactagaggtccgcaaagctgtggcagactgttctgtgtacactgcagatgtccccggtttgtcccagtgagcctccaaatgtagtacccagatcagcaacagtagctttgcatccctgatgtgttctgaggatttcttaaaggtctccagcagaactcagcctcagcatgccagagaagtcacttcatcgccaccaaagcacttacgtattgtttctctttcccaccgaactcttctctcccccgcaacccgctgcctcgctttcctggtatcaacccccagatcgatcagttccactgaattctcctactctcaggacgacctccatgtcttacccaatcccagcatccatgcagtgtctctgaggcttctgcagccttttcccgggcttccgagtgtccagcatccactgtgctgagccaagagccctgatgaactttgctaatgacctgaaaaggcgggccccacggccgagttacttttagcggcaatttttcaatagacatacgtggaaggggccaaacgtgtattgtgaaacctacggcagagcaagggaaacagctggggtggatggacatccacatgccacctccaaggtcacgctgctcctctgttcagatggtttcttagctctatgcccacctcaggtcacacagactgggcctcctttgcaatagggcttctggaagaacacgcttcccaaatgctcacattcaagttcctaggccaggcttgtgggccatcacccacgccctcctcctgaaacactatctgtagaagagtgtgggaccacctacctttacctctttgttccctcccttgaggtgtgtgttagcccaagtccaaccagggtcttctgtgggagtaaggagagacaagacaagatagcagactcatttctctgggtcaacctgtccagcctcctgactctaaccccatttcctatccccccaccccctcagaatctctgctcagtgccttgagctccttctcgaatctcaggagacacaagtcttagtgtcaattttgctccttccaatcggtgaaatgaacctgtctgcttaaaagagcaaacctgtttctggacttcctgggaaggtggtgctgagatagaggggcaggagacagagacgcgggcatctagcgtggtggggctatgtacaaggatatgaatgagtcctggcgttgtccaagtgctgcttaaggggtggaggagagagaggagagagatgggaagatggatagcatgcctctgacttgtccttgctcctcatctctatttctgagtctctcactgtctctgtgtattcacttctttccttcaatgtatttctgtacctccctttctactccactctcttattctaagactatctatccttttagaatctctcatcggttctagctctgtgtctttgcctcaatgtctgtctgtctttattcagggatattcttattcccagtagctccagggcgtctccatggtaggtggtgctaggggcgcgtctttgagaggagggaggagggaggagggggctgcctacgcctttaagcgcgggcgcgcgcggggcctgcgcctttaagcgcgggcacgcgcacggccctgggttcccggcgaggaggccgcgggagcacccggacccggcccgcctgcccggcccccgcccggcccccgccccggccccggcgggggaggggtctctgagcgcgacccctcccccctgagcccccactgcgttgcgatgcccgggtccccgcgtggccctgtctgtctgtccgtctgtccgcgctcaggcctcgccccaccctggccctagagctgcccggctgccccccacccgccacagcagaccccctctttctgggcctgtctcctcggcaggccacgaacccagccgcgccattgctgccccagaccctgggccggtaccctgacatcggggtgtgcttgcagccggcgatcggatccagatattctgaaacccccaagcgtgggaccctgatttgggatcagcaccttgagctcctgccatggaaccctaagactcggaccttgaacctcaatatctggggctggaatcccgacatccgtctctgggaccccaagatttggaagccgaaccccattattttggagcatggatcccaatatttggacctgggaccccaagatttggcgtccaagcccccaaaattggagctgaactctgaattgtctgactgatacgttgacatctgggagcgaattcccaaatctatacctgggaccccactattctgggaaataaaccctgggatgcaggccttcaattccaagatctgaactgtggaattctgtgggggagcctgaagtccttgctgcagacataagtgctgaaatctggggctagagacctccaagtcttgactcagcaccctagtatctgaacaggatcccagtttcggatgccagaactggactcgggattcagaccctaaacttccccttctggctgttcggtgtctcaagcctggcactgagagagcctgagcctgaaaaaccactggggccttggtctctcaagctggactctcgaggcccagtgttaggggtctggaaccccgagagtcaagtttggagactccataaccacagaccagacctggggcaagacagttccttcccagaggccctgaggacaggggagtcttgacctgatgcctcctccagagttctgacctcacccccttggagcctaaggacactgctccctggggtggcttccagttcaggtaaggccactgagagacacccgtggtgggaagggacttggggtgggggtggggtttcttgggctacaggtggaagtaggtaagtaccaggtgccctgtggcatcctaagccgttttcattgtcccatgagtgtgtcaccaaccctctctggacacatgaccccagctctgcccctctctggcctccttgatgggattctagatctcgatgtcaccaccagtctagcttctggccgtctcagcatcctctctggacccctttctccacctctcctcacaatgacagtttctgctttgctctctgagctgccttgacacccctgtcccctgccctgttgttctccagtcacatctgcccacagcctctctcactgacacttccttcccagtgtctccctgatccactggctttctcaacctttgcccactcctgacctctaggctgagactgtgaccatcccaaatctaacatctgtgcagtcttctcctccctaccttgccctcctctcctgctgtttcctctgtccacctcccaccatctctcttctctccctcctaccctgcgctaactcccggtctacccccacctggccagctctgaccatttctaccttgtctgtctttctaccgctgctccacctctccccaaagccttttctctgaccagttgttctggttccctgatgactggtagatctgtcctttctcctctctctggctttcttactggcttttgactaggtcaaaactcttgtatctctttgtccagatagacttagaaggaccactgcgacctgctagcccttctgctcagtttccctccttagtcatgcctgacctttactgattgataatccttgccaactgcccacctcttctctgtagctcgtctagaccctattgcttactttctctccaccttgaccatctgtccttgcctctgcccacctgtgcacatttctagccagctttctgaccatcatggctcatgcttgactctctgtgccttcatgacacatctctgacaccccactccacccccaccccccacctctctgagcatagtatggccatcactccccgtttctggccccaacactgttccttcttctctacaggccacccctgcccgcgatggccgtccttccactactcctttgcctgctaccgctggcccccgcctcatctccaccccagccggccatatccagcccctgtccccgccgttgccgctgccagacccagtcgatgcccctaagcgtgttgtgcccaggggcgggccttctattcgtaccgccatcactggatcgccgcgctgcagaactgcgcctggcagacaacttcatcgcggcagtgcgtcgtcgagacctggccaacatgacaggcctgctgcatctgagcttgtctagaaacaccatccgccatgtggcagctggcgccttcgccgacctacgtgccctgcgtgccctgcacctagatggtaatagactgacctcgctgggcgagggtcagttgcgcggcttagtcaacttgcgccacctcatcctgagcaacaaccagctagcagccctggcagctggtgccctagacgactgtgccgagaccctggaggacctcgatctctcttataataaccttgagcagcttccctgggaggctttagggcgcctaggcaacgtcaacacgttgggccttgaccacaatttgttggcttcagtgcccgctggagccttttcccgcctgcacaagttggcacgactggacatgacctccaaccgcctaaccaccatccctcctgacccactcttctcacgtttgccactgcttgcccggcctcgaggctcgccagcctctgctctggtgctggcctttgggggaaacccccttcactgcaactgtgagctggtgtggctgcgacgcctggctcgggaggacgacctcgaggcctgtgcctcgccacctgctctggggggccgctacttctgggctgtgggtgaggaggagtttgtgtgtgagccacctgtggtgacccaccgctcacctcccctggcagtgcccgcaggtcggccagctgccctgcgatgccgggcagtaggggacccagagccacgagtgcgttgggtatcaccccagggtcggctgctgggcaactccagccgtgctcgtgccttccctaatgggaccctggagctactggtcactgagccggaagatggcggcactttcacttgcattgcagccaatgccgctggcgaggccactgctgctgttgagctgaccgtgggtccccctccacccccccagctagccaatagcaccagctgtgaccccccgcgggacggggaacccgatgccctcaccccgccctctgcggcttcagcctccgccaaagtggcggacactgtggcccctaccgaccgtggcgtccaagtgactgagcatggggccacagcggctcttgttcagtggccagatcaacggcctgtcccaggcatccgcatgtaccagatccagtacaacagctcggccgacgacatccttgtctacaggtgcaggggcctggcagtgggggagtgagatggggggcggggcggggcactgtgggtccacccaggaataccccttgtgaaccactacaaggaaataacactgtaggttccaaaggaaatcagaaagtgaaggcaaacgaaatcaggcagcagtgataaccacggctgggcagaaaggggtaaaagaaatccagggcagatgtggtgaaggcagttgagacgaggagggtaaatcagtcagacagcaggctaacaggcgcaaccaaaggacaatgagtttaaaaaaaaaaaaaatcgggctgcagaggtagaaagaaacaagactgagaacataaatggtaacaaacatacaaagccaggggaaaaatcaggtcaaatgagtaacaagttaatggttaacagtggttgttcgagtgtagttcagatagcatgctatacaatagcaagcaggcagccctgaggttaagcccagtgctgaaggaagagaaagttaaggaggttatggttaaaaataaattttatcagggagtttggcttttcacaggaggctacaatagggaggttgagtcaggattgtgacaagttcagggccagcctggtctacatagggagtttgaagctgaccagagatttatagtaaacagtgcctggaggaggggaggagagggagaaaaaagagcaagaaggggtgggggaaatgggcaggaatgtacagagacagcagagaaagtctaatgaggtaggcaggggaaaggagggcagaggttaagtgggaaattgggggtaggaggttaaatagagattaggtcttgggttcatgcagtatgagccctactggtcaaagttctggttagagtaacatcctaatttttggtttgctaaatcaaatctaagctaggtcagatgtgtcagtgcacggccgtctatctccccagctctcaagaggttgagacaggaggatagtgagttcaggggcatcctggactatacagcgagaccttgtctcaaaaagccaacaagcagcaacctagtgagctatgtgggcagaaatgcccactctgatgctcctgtcacacacacacacacacaccccacggctgcaaacacaaagcccggtgtttacacactccaaaagggcagtcagtgtagcttctgtccctctgctgtcaccacagtgggtagaaatggtggtggctgacactccccatcaaagtctgaccttgtgtgggcagctgtgggggactccctatcctcaatgccaggctgggccaagaatacagccccaaacttggcagtaacctcccacgggatgggttagcaccttgcaaacccagtgcctggatccacaccccccccttccctggccatatgtcaagtcaagattctatcttctcaatcctaatcccttcccttctctctgtctcccccccgctcctccccccccttctgctttagagctcatgtagccctggctggcctcgaactggccatgtaagccaaggaccacactgagccccgagcccttctgccttcacctccccgtctgcgggccaccacatgtggcatctccactccttttctgaaacattattcaggagattgcatggagggcgacccccttgcctggtggggagtgggacagtctggagacagccaccctgccacaggtcattgcaggtgtccttgtgttacgctccctaaagcagggtaggagtaaaacagactctaaaactagcccagcctctgccagggcatcccgagacgaaagtaatgtgtggaattgggtgagaaaggcgagaaaactgtgagtgtagtggctcagaccttaggctcagccctggagagacttgaggcaggggactgagagttccaggtcagcctgggagctacatagccaaagcctggctcaacactcacaccacacacacacacacacacacacacacacacctgcacacagacatgcaggcacatgcatgcacacgcatacttgcacacacatgtgcacacaggtaccacatacacaaaggaaaggctaatcaggaagcgggaaatggagctaaaagagaatgaagagatgaacctggaaagtagtaaggccaaagagggaagagaatctgagatggagattctcaagggctcgccggaaagactataaagtcggtgatggtaacaaggtactggggctgcagggaaattcactggcaagctggaagcaaagcaggcaacagaggtacaggggaagcagtggttagggtagaggggtacagctgccacatactagggaaatgcacaggagctggacaagggaaattagagctgaaaagaagtcaggcagcggggtgtggggtgcgcggctgtaacatcagcgcttggagttgcagagaggatcatgaggagttcaaggctagccttggctaagctccgtgagaccctgtcttgaaaaaaataagcaatcacttccctaccttgtggctcagatcaagtgtagtatctgctcctaccaggttagtatctgatatgtcctctgtccgaggacaatatattaaatggattttttggggagctgggagatggagcagcagcttgctgtgtccaagatactccttgatttggtgttgcagtagtccaggaatggtgcccccacctcaagggcagaaagcaaatataaaaagcaaaataggagtcacagggagatagtctagcaaaaagatggctggaggatagagggagggggccattggtcaggtgtagtgttaaaacggttctatttccagcactctggaggctgaggcgggaccttcacaagatatgaaccagccttggctacatagcaagactctgggaggcagggggcaggaatcagacagggttagcataaagcagagctttgctggtgaggctaaggacttagctgaacagggcgggaggcaaggtgccaaaaagggtcttgaaggatgttaggggctctttaacaggcctagggaataaatctctgaaagaggaatggaatatcttaggcttcagagaaatagggtgtgggatccacaggtgctcaaaattgggaccttaggtgggagactgaagttggctagcccactggaccgtcatgctaagtgttagctaagcaaaataagtcagggtgctggttagatggacctgggttgcaatggggcagctgtactgcagggaacttagctggagggaggcacagggcagatagatcttgggtattgggtgaccacagtcctgaccccatctatcaccctccctcaggatgatcccagcggacagtcgctccttcctgctgaccgatctggcgtcaggccgtacctatgatctatgtgtgctcgcagtctatgaggacagcgccaccgggctaacggccacgcggccagtgggctgcgctcggttctccacggagcctgcacttcggccttgtgctgcaccgcacgcacccttcctgggcggcaccatgatcatagcgctgggaggtgtcatcgtcgcttctgttctggtcttcatcttcgtgctgcttctacgttacaaggtgcacggaggccagccgcccggcaaggccaaggctacggcacctgtcagcagcgtttgctcccagaccaacggagcgctcgggcccgtgcccagtgcgcctgcccctgagcctgctgcacccagggcccatactgtggtccaattggactgtgagccctgggggcccagtcacgaacctgcaggaccctagccaagggcccacctctatggttcctctggtcccagggacacccctcgggacctggcctcagactcaccaaattgctcacggtttttaaaactctgatggggagggtgtcgggggcaccggggcacaacaagaaagtcctatttttctaagctcgggctgttcctttgcccttgtctgtctgtggggactgaggggtgctgcggagggtatgggggcgggggttgaggaacatcccctgaggaaggcacttcctgtcattcagcttggggtctctgcagaggagttgaggatagtcatctatagtcatccatataagcactggacgttctggggaccgagctgtgctgtggcttgtgctggggactctgacccaagctgccttgccctcagtccagtgggaaacatgtcttgagatagccatactccagaatacagagttgagggatgcccagggggttgtgtgcccccccaccaccaccgaagaggaacctgaagtatagttcagggaaggcttcctggaagaggagggatgtaatctaagtagcatatctgaaggagagcattgggcaaagagcagaagggaaggctccaggtggagggcataacatgaacaaaggctgggtattaccaggcattgggttgctgcggtactggtgaggtgggaggggccagcatctgagtgaggtgctcatgatggctagccacggaggatttcatgcctgggggccgagtgggggaggttgtgggtgggtttctagtgcttcttgagggaggtgaaccagaggcaaggaatccgtgggaagccaatgtaggggtgagggtgggtcaggaccaacttcaaccagggaaacattggaagagaagagtggatgacacagccattcaggaaagtgagcagatggatcacagtgctcagagaccatgagggaggggcttatctagagtgatgctctgggctctggccaggggaaagtcctccaggctgccctggctgaggacgagggagcaggggcacagcagagatgctctgtggtcagggtgggactctgcagatgagggaccaggggagggcgagtggggaggggagatggagacgttggagccaaggatagaaagcagggcttagcagacagagtatcccacccctatcatcctcacacctcaggagacagaggcaggagaccagtagttcaaaagctgacacttcagcatgagacccatcccccccccaaaaaaaacccaaaagaatctgggagcagtcgcaagattgaaccatctactggggtttcagtctttaaggtagaaacggaaagcttttggcagctgcacacggaggagaaggtgaaaaatgtcccaagagactggtgtgtttgctaggggaaaggttacagtggagggttggggggtggagagtcagtgccacattgaaccaatctagcagatatgagtgtggacagggactgagcccaggttcagcgtgagtcagagcacttggcctcatgtctttcctgagctggtccccactgtgtcactgcccggggccccctcacacaagtgtcctggaagtttataggatcagacactgggcatggaaaaggccaggcctcattagaggtgcaggaatggggtcaacagcaagaatagcaccccccccccatgcaagtagcttctctgatggcagctgggggggggggcggagcaggggggggggacggggaagggcctgtcagtcacctgaggtaagatgatgttaggatcagggtgaagacaggctaagagtaaactggaattctctcggtttggtacaaagaatgttctggtgagatgacagaacctatttttcatggtggaacttgagaccttcaaaatgcccaccattaaccatggagatgaggcactcagctccccagtcctgcagcatcccgaggtcctttgtcattttgttactctcgagtagctaagatcatgtgaggctatcaacaaatcacagcataagccttgggccatgggagctagcaagtgggaaggctggctcagtgccacctaggaaatacccactcccaccttaagggggagccagagtacacagttcataaacctgttgttaaaatttgaactgtgtgctaggtcatggggcagattcgggtacaagtcctgccctgccctgccctgccctggcagcatttgtgacacgcacatatgttaaatagggatgtgtgggcagcagaggtggatttgactccagctgaggagttaagtcccaagccgaggctggaggtaattagcaagcagtgggaacagtgttcaatggacatggaacggcatatgataaggtatgcattgtgagaaaaagggagagggagggaagccagaggtgagatggagtgagggaagggaattgtcataatatcaggcaggaagcgggcgatgtaaaagccctgtaaattcaccagaggagggaggattccattctaactgacatgagaaaccactgaaggttccttctgtcttgttttctttgagttgggggtctcacaacattagccccaatttggattcattgtctagctcaggtttcctgacctcactcgtgacccttctgcctgggcctcctgagcccaaggatcgcaggcatgcaccgtcactcctggccactggaggatcccgggctatgaggatcttcccggatctcaaggaagctcccatggcagagcttgtgtgtatggagggccaaggggaagcacggggaaactgaggaggaagacactgcaacagttctggcagaaggctgtcttagaccaggctagacctgagctgacatcaatgacagcagcaggctcctcctttcctacccagaagaggacagtgtgaactactagcagctggtctagaagagagggaaggaaggttgtagaaagtaggggaagagggggaggcccgggtctccaatcccaggatccatcccctagagctgatttttctgtaggaagaagtgacctttggcaagccaagcacaaggcagccagcagatagaggccaaaagaggctgaggctgttgaggtggatccaggcccagtacacggggctagaatggagatgcacacccagtaccggcctacgacaggtgtggaggcatgtgaatggagaatgatagtggtgatagcaaagtcccctgaaacttcacaagacacccagactgccccgcacccctgtgcacaaacaaacaccgccggcatctaggatttcaagttaaatagccttgcccagccgaagccacccgctccctgaggtcaggatatgatgtctactgcccatcgcctctctagtcaaagcaatctggccaccaaacctaggctgctgaggcactgtctcctggtgactgctgtctgggttctgtactgtcctcgaaccatactgcctagccacagctcttggggtgactggagctggtgtgagcccataacatcaggagattcccatgatcctctggcaggccttccttgaggccaagcttctgcggcccttcccatgggctcctaggtgggagaacctgatgaggtggagtgtggggactcctcaaagacagcgggtctcccctggatagtgcgacccagtgatccatgctgaggatcatcagcaaagtctggaccccgcatgcctggaggggtgtcggtgcttggcactgtcctggccttagtgaggttagagtgttggggacatgggatgacaaacagcccaggtctctgccctcttggggtcccagttcttagagaacaagcagatacaaatggtggccaggatagactgagaaagaataggcaggaaggatggcagccgttttttgttctctggtgctttgaacagggtctcatggaagccagagtgaccttgagctccaaatctctttgcctctacctttcaagtgccaggattataggcactaccgcatgccaccggtcctgggggacttgggagcctacggggactcctaactgagactgatgggagcaccaagatgtgctgaagatgggactttttaatgtgtcctgtgcttacaatggcttaatgtcccgctgctactgtcctttttaaaaagacagggtcttgtctgcatagtccaggatgaccttgaactcagtcttcctgccccacttgccccaggtgctgggattacaagcacaaactagccacacccagctctcaccttaaacaccttgaaatccctaatacactttgaacaagctcagcaccacgtccctttttggcaccccgcccttcagattatgcagccaatcctacctgaagaagatggtgaaggatggaagagagctaggctttcccccaaagacccacaggtggtggtgatggggacctttggccccagcacttgggaggcagaggtaggtggatctccaagttcaaggccagcctgctctaaaagttccaggacagtcagagctgttatacagagaaaatgtcaagagagacagagatagaaaaatagggcgtgcttgacagagacagaaagatagggcgtgcttgaaggacgagcttgagggagctgtggttggagcttccagtgggagaacaggcagggcaacaggtgacctggggtgccccgatgctgccccagagcactgttgtgccaaggagggggctgggcaaagagagacagcactcagaaagccacctgacccctgtggaaggggaaattgaggcacgtggtcaagaacaatgtgtatgggagggggtggctctgcttgctttaaagggaacggagtgtccacaattctgaagaaggaactgggcaggtcccaggatcaaccctgtccttcattctcaactgttaagtgttcacggggaaggaacacggagtggccgcttacacaatgcccatgctaagtgctagaaaatcttagaacccaagaacactcatgagttgtgctggaagcaacgctgacaagaatttgagaacatggaatttaaaagattttactcaggatgtgttctggcccatactccctggaacccctggggcacagtgcactctcctcagccccatgggtacatcagcacttctacttccttctaaatgctcttcctgccccagggctggggatgaaccccccccctccttcatcttctgttcttctcagctatcaacctgagcctgtgtctggcatcctaatttcacatctggcttcccaccgcttccttggcccccttttcctagataaatatgcaacctgcctcagcgtctttcctggccagcacctttgcccagtttgtattcccacaagccctgaggatccactgtacctccccatcctccttttcctagttcgagtctggtctaacactgctttaactacccggattcctccacggacctccctctgggatcctggccacagcattcctctctgacccaaacccttcttagtgtcaaacctgtcggctgcatataagcttccatggctcaccagggtcccggttcagagtcagagctgtctgggaggctgagacaggaaggttgcatgactttttgagtttgaagccagcctgggatacatcacaagaccttgtctttaaaaaagcaaacaaaacccttcactttggggtatctatgacccccgccttcctcgagtaccatctccaacataacactccttcagtgtagacagaatactaaccattcccaggaagcgaaggccctcccatcatgcctttcttcccacaccccctcatttaccctgcttgggatgacaagcctcccgggaaagcgacacaggaagctgtggaaagaaagctccctctctctttatgtcttaccaacaacaaagcttctaaggagaagagagttagaatatgggggagaaggtgttgagaatctgccccccaccctgtctttcccagccctcctagctcccccttccagctactcccttgtaggagcagtcctcgaggggacaggagaggggaggccaaagctatcccttggaggcctcagctccccaccctccagatctcctcatccagccttctcagtattctctcctgctctgtctccagtcgctcctgcaggccaaacggtaggcctccaggtctccttccctaaacttgggcgttccctaaagtctccaggtcctctttcagacgcagcagcgatctccactcccttcctcggaacccaggcttcccactgcgacccttcctagggcctcagaacgtctagccaaaagcttcttcctcctcagcaggctatggaggctgttcctctgttctagaatgttcttccggtgtcggcttcctcacttgaccgctttgccccattcttctgtttacaggaatatagagcctccgctccctccaaacacgatcaaaccagttctctatactcaaagacccttttctagtcctaatgtctctcaaataagctctctccttctctccttccccaccaagtctccttcccttccttcctgactctctccccactcgtccctctctgcccttccctcacatcctcctcttcctcctctccctcctccttgtaattcctcaacattccctcgtcatgtgcctgttcatctccaacatgtctcacctcctcaaccaatccctcttccccccctcttccgccatctgcctctagtctctaaccccacaattccaacctgatggtaacaggtcagactggagccacacatcccttgctgcttcagggagcgtgatgagggccaggaccaagcttaaagatggtacacaagtgacttgtagtatacacagctccccctgggtcccgataggcaagagccccagcctacctatcctatccatttctgggagtgtgcccacagggaagagggtcaagaggccctctaatactcggtcatcgctgccttcatacctgctcgaacaccttgatgctctggatttcccacagacatgtggatgtacaaagacgatggctggtgacctcagagccaagggtggaaaggctgcctgacatggctcagtgaaagtggaatttctttggacgcgattctggctggttaggacaagatctattgacagactgtgccagtagatacgacaaactggttctggaagcataataaggcaggcagaccagaaaaagtaagccatctctcccagctctgtgaagtgtgtgtgtgtgtgtgtgtgtgtgtgtgtgtgtgtgtgtgtgtgtagcagctttttgagatgagggaaccagagcccacagaagttaggtgtatggttcaagttcccatggcttgaaaaagacagtgaggattcaaacctggcggaatggcctcccaatctacccaactattctggttccctcctctgcgctccgggttcactcagactcaacagctgcgtttgtgggtttctagggccgccgcttaatcacagctttcttggaaaacgggggcgctgagaaacccgacttccggctgtgtgtgtgttgccaccgcccgaagggccccgatggtggtgctactgtcagtaccaatgagccggcgcccagtgcccaagggctgctgaggaatccacgtgggcgagcctgcctggacccaacgccgcggcgccacctgctgggcgctcgcggtgatgccgcggctacggccgggcgactcgcagtcagctttctggggtaatgggcctcctgctgcacataacctgcctgtcagtattcttacatcttgaacccttccttccaggaacggcaggtgtagagcagaatgcgggtgaccaatcaagttcccatgatatgccattcatccggtggcactgatgattggacattcttgtcagcaagcaagacacaagggtaccaactactgctgctcaagggtggcagggaccgccagggcctggagaagcgagaagacctgttgaggatcagggtcgggaaaaattacaaaactacattctattcctcatgaagccgccccgagaccgtttttaaaattcgaatcatgtcccttctctactcaaaatcccccagtgcaatcaccccgcctgccagcagcgccagagtcctgacagtgatttataagtcctacatgagggactggaggtggggcgcacccagttgatagagtgcttgcctaggatgtacaaagccctgggtttgatccccagtacttgcctattctctcagcactctggaagtggaagcagacacacagaagttcatagtgatgtgcgagacaagcataacatcctgtctcaaaatcaagtaggtgaattaaatttaaaattagagccggtgagatggctcttcatctcactggttgctaagcctgacgacctaagttcgagtccccgggacccactgagcaggagagccttggcacctacgagttgccttttgctgggcaggtctgcaagctttggaccacctctttggcagcagtagtggctgggcgtggtgatggtggtgtgtgcacaccttggtactgctgcgtcacaggcctataaataggtgaggctttatgggctaagtggtaagtgcttttatatataatgtatgcatgcacattatgtaatatattcctcacagtcaacctggaggcaggtctttttattatcccagttttatagagaaaccaattggaggtcgaaggcgctaaatcattgcccagagccacactcagagcaggtggctgcttgtaaccaaaattctccggggctattggaaaggagccgctttgcctaagcagcacaaagctttgcgcagactctaaatgcggtcgggcgctggccatggtgctgaacagaatagccgcagcttctccgcttgagattgtcaggtaaccttggaattaaggagctctttctcaaccatggtgatgaaagaaacgtgaaagtgtgttcggaaagaatctatagtttctcagcaacgaagacagaaattttcctgtctcacaaattctgggaccaaagtatctacttttttgttgttgttgttgttggtttttcgagacagggtttctctgtgtagccctggctgtcctggaactcactttgaaccaggccagcctcgaactcagaaatccacctgcctctgcctcccaagtgctgggattaaaggcgtacgccaccaccacccggctcgaagtatctacttttattattttaaaatatatatttattcatttatttatttgatttttggagacaggtttctctgtgtggctctggctgtcttagaacttactctgtagaccagacttgcctcgtattcagagatccacctgcctctgcctccctagtgctggaattaaaagcatgtaccaccactgccattattattattattattactactactactactactactactactactactactaactattattatcttcgagctgtactctggagtggggagcaagcttggaaccctgacccaaactagatgagctctcataagtcacttcccctctctgaccttccacttcctcctctgtaacagtggagaacacaccaacacaccatgtattggtagcattttaaaaaggagaacccagtacagtgatccatgattatatcctagtacttaggaggtgaggcaggaggattgttctaagcttaaagcagcctgggctatatactgagttccagaccacagtaacaacgcctacagtacagtagatatttgttctaaacagggtctcattatgtagctctggaccttgctttgtggaccacactggccttgaactcacagaggtctgctggactctggctcttcggtgttgggattaagggtgtccaccacactggcttctcctcttaaagaattccacaaatatatggtgagttggtggtgttctccacctttacagaggaagcagatgatcaccacttttaagtgaaattttatactatattttttttagacagggtttctctgtgtagccctagctctcccagagctgtctctgtaggcaggatggcctcagactcacagagatccttctgggattaaaggcatgaacaacctctgcctggctaagacaacatatcttaagtcacagtcaaaagactagcagagctaaagagatggctcagcagttacatgttgcttttctggaggccatgggttcgagtcccagcataaatttagcag

SEQ ID NO: 1015 - DNA, 2034 bp, Mus musculus
atggccgtccttccactactcctttgcctgctaccgctggcccccgcctcatctccaccccagccggccatatccagcccctgtccccgccgttgccgctgccagacccagtcgatgcccctaagcgtgttgtgcccaggggcgggccttctattcgtaccgccatcactggatcgccgcgctgcagaactgcgcctggcagacaacttcatcgcggcagtgcgtcgtcgagacctggccaacatgacaggcctgctgcatctgagcttgtctagaaacaccatccgccatgtggcagctggcgccttcgccgacctacgtgccctgcgtgccctgcacctagatggtaatagactgacctcgctgggcgagggtcagttgcgcggcttagtcaacttgcgccacctcatcctgagcaacaaccagctagcagccctggcagctggtgccctagacgactgtgccgagaccctggaggacctcgatctctcttataataaccttgagcagcttccctgggaggctttagggcgcctaggcaacgtcaacacgttgggccttgaccacaatttgttggcttcagtgcccgctggagccttttcccgcctgcacaagttggcacgactggacatgacctccaaccgcctaaccaccatccctcctgacccactcttctcacgtttgccactgcttgcccggcctcgaggctcgccagcctctgctctggtgctggcctttgggggaaacccccttcactgcaactgtgagctggtgtggctgcgacgcctggctcgggaggacgacctcgaggcctgtgcctcgccacctgctctggggggccgctacttctgggctgtgggtgaggaggagtttgtgtgtgagccacctgtggtgacccaccgctcacctcccctggcagtgcccgcaggtcggccagctgccctgcgatgccgggcagtaggggacccagagccacgagtgcgttgggtatcaccccagggtcggctgctgggcaactccagccgtgctcgtgccttccctaatgggaccctggagctactggtcactgagccggaagatggcggcactttcacttgcattgcagccaatgccgctggcgaggccactgctgctgttgagctgaccgtgggtccccctccacccccccagctagccaatagcaccagctgtgaccccccgcgggacggggaacccgatgccctcaccccgccctctgcggcttcagcctccgccaaagtggcggacactgtggcccctaccgaccgtggcgtccaagtgactgagcatggggccacagcggctcttgttcagtggccagatcaacggcctgtcccaggcatccgcatgtaccagatccagtacaacagctcggccgacgacatccttgtctacaggatgatcccagcggacagtcgctccttcctgctgaccgatctggcgtcaggccgtacctatgatctatgtgtgctcgcagtctatgaggacagcgccaccgggctaacggccacgcggccagtgggctgcgctcggttctccacggagcctgcacttcggccttgtgctgcaccgcacgcacccttcctgggcggcaccatgatcatagcgctgggaggtgtcatcgtcgcttctgttctggtcttcatcttcgtgctgcttctacgttacaaggtgcacggaggccagccgcccggcaaggccaaggctacggcacctgtcagcagcgtttgctcccagaccaacggagcgctcgggcccgtgcccagtgcgcctgcccctgagcctgctgcacccagggcccatactgtggtccaattggactgtgagccctgggggcccagtcacgaacctgcaggaccctagccaagggcccacctctatggttcctctggtcccagggacacccctcgggacctggcctcagactcaccaaattgctcacggtttttaaaactctgatggggagggtgtcgggggcaccggggcacaacaagaaagtcctatttttctaagctc

SEQ ID NO: 1016 - protein, 618 aa, Mus musculus
MAVLPLLLCLLPLAPASSPPQPAISSPCPRRCRCQTQSMPLSVLCPGAGLLFVPPSLDRRAAELRLADNFIAAVRRRDLANMTGLLHLSLSRNTIRHVAAGAFADLRALRALHLDGNRLTSLGEGQLRGLVNLRHLILSNNQLAAAGALDDCAETLEDLDLSYNNLEQLPWEALGRLGNVNTLGLDHNLLASVPAGAFSRLHKLARLDMTSNRLTTIPPDPLFSRLPLLARPRGSPASALVLAFGGNPLHCNCELVWLRRLAREDDLEACDPALGGRYFWAVGEEEFVCEPPVVTSPPLAVPAGRPAALRCRAVGDPEPRVRWVSPQGRLLGNSSRARAFPNGTLELLVTEPEDGGTFTCIAANAAGEATAAVELTVGPPPPPQLANSTSCDPPRDGEPDALTPPSAASASAKVADTVAPTDRGVQVTEHGATAALVQWPDQRPVPGIRMYQIQYNSSADDILVYRMIPADSRSFLLTDLASGRTYDLCVLAVYEDSATGLTAWVGCARFSTEPALRPCAAPHAPFLGGTMIIALGGVIVASVLVFIFVLLLRYKVHGGQPPGKAKATAPVSSVCSQTNGALGPVPSAPAPEPAAPRAHTVVQLDCEPWGPSHEPAGP

SEQ ID NO: 1017 - DNA, 33362 bp, Homo sapiens
cactccaatctgggtgacagagtgagaccctgtctaaaaaaaaaaaacactatgcaaaaattagccaagcttggtggtgtgcacctgtaatcccagctacttgggaggctgacgcaggagaatcgcttgaacctgggaggtggaggttgcaatgagccaagattgtgccattgcactccagcctgggcaacagcagagactccgtctcaaaaaaaaaaaaaaaaaaaaaaaaactaactaataatgcttgctcattataaaaaatttgaaaaatgcagcaaaataaaaaagaaaaagaaaattcacctacttctaagagacagcttctattaatgtttaattatatttcctgtcttttactgggcatatttgtatgtattctgaccatcctgtatatagaaatttgcatcctgaccatactctatatgcaaatttgcatctggcacatttttgcaaacaatttttattaacttggaatgaacagctgtatttccttcaactactcaaatatgacctgacctcactattgtacaccacctttttgctctggaaagtaaccaaagagatgatcctcacagtccttagggcagaataaattatgttttttcttttttttttcttttttcttttttttcactctgttgcccacgctggagtgcagtggcgcgatcttggctcactgcaacctctcactcccaggttcaagtgattcttctgcctcagtctccccagtagctgaggttataggcgtgtgccaccacacccgcctaatttttgtatttttagtagagaccgggtttcgccatgttgcccgggctgatctcaaagtcccggactcaggtgatccacctgcctcagcctcccgaaagtgctggaattgcaggtgtgagtcaccacacctggccagggcacaatacattttttgttttgttttattttttgttttttgagacgcagtatcgctctgttggccaggctggaatgcaatggtgtgatcttggctcactgcaacctccgcctcccaagttcaaacgatcctcctgcctcagccccgctagtagctgggattacaggcacgcaccactatgtctggctaatttttgtatttttagtagagacagggtttcgccatgttggccaggctggtcttgaattcctgatgtcaagtgatccacccaccgcggcctcccaaagtgctgggattacaagcgtgagccaccgcaactggctttttttttttttttttttttttttgagacagagtctcgctccgtcaccaggctggagtgcagtggcacaatctcggctcactgcaacctccaactcccaggtacaagtgatcctcctgcctcagtctcccgagtagctgggattacaggtgcccaccaccacgcccagctaatttttgtatttttagtagagacggggtttcaccatgttggccaggatggtcttgatctcttgaccttgtgatctgcccacctcggcctccctaagtcctgggattacaggcgtgagccaccgtgcctagcccagaataaattaaacattaaagcttagatttcatttctcagttcacttgtatttagaaagagctgtgggggcgaatctgtttcccttttcctcttccccctgcctgggagccatcctggatctttcaggccagtgctttcccagggatagtagcacaaaagtggaagccacctggatctctgactccgtgaagccttcacaccaattctgcattctttatgtttggtcaatttgtaggagagaaataaagttcgattttgcttaagccactattatcaatttcagctacttgtatttcttgtctaacaaacagtgctcatgaaacatgatccatttctcatattcctgaatctctttagaaacaccagtcttgaggctgggttcagtggaaggccaaggcaagagaatcacttgaggccaagagttcaagaccagcctgggcaatataacatctctacatacatgaaataaaaaaaatacgacgtgagtggatcatctggggtcaggagttcgaaaccagcctggtcaatgtggtgaaaccccgtctctaccaaaaatacaaaaattagctgggcatggtggcacacaccagtaatcccagctactcaggacgctgaagtgggagaattgcttgaacctgggaagtggaggttgcagtaagcggagattgcgccactgcactccagcctgggtgacagagtgagaccctgtctcaaaaaaaatacttaaataaataatttatggcgtcataaaaatccttgtaatgaaatcttttcctacttgctggagtacttccaggaagtaaattcctagaagtagaaataatggaacaacagatatgcgcattttcaggctttggatgcaggctgcccagttcttccgaaaggtcatcctcgtttgcagccagcaatgggagtggggtctcccatgtcgctgtgctctccttggctatagggaaccagatttctgatatctttgctgatttgacggcaaagaggagggtttcagtacttcaagttcagttattactggtggtaaacttggctttgatcaatttcagctatttgtatttcttttgtgatctgtcttttcctctcatttgcccatttctcttttggctgattggcttctcatattaaatttattaatgttttcattaccttaaggatgttaactatttttttcttttgtgatctgtcttttcctctcatttgcccatttctcttttggctgattggcttctcatattaaatttattaatgttttcattaccttaaggatgttaactatttttttcttttgtgatctgtcttttcctctcatttgcccatttctcttttggctgattgccttctcatattaaatttattaatgttttcattaccttaaggatgttaactatttttcttgttttcctttaaaaaaatttttttttaaagagacacagtctcaccctatcatccaggctggagtgcaatgacagatcacagcttgctgtaatctcctgggcacaagagatcttcctgccccagccccccgagtagctgggactacaagcatgcaccaccacacctggctaattttcgtattttttattagagacaggatttcaccatgttgcccaggctggtcttgaactcctgagctcaagggatcctcttgccttggcttcccaaaatgctggaataacaggtgtgagccaccacacccagcctcttcccacattttactctagtccatctggaatttattttcatttatcagtctccaaattaatatttgtacctcaaatggctaagacagaaatccaactgctgtgacattatgcttctgttctataatgcattcttgctcttctgctctgtctttggccagtcattctggtacattacccatcaagattgttcttacactgaaacacactttaaattatgtgagcttcatgatgttactatcttgtaaccaggctctatccacagcacctagagcctggcacatggcaggatctcaagaaatatctggcaaaagaatgaattactgaatgaataagtgggaaaataaatgaataaatacaatatgcagctgagcgtggtggctcacacctgtaatcccagcactttgggaggccaaggcaggaggattgctcagccagttctggccccactcaacagcccagctgagctcgaaaccaacagccagtgacattgccaaccatggacatcagccaccttggacatcagcctggttgaactttcacatgactccagctccctccaacatctaacttcaccacatgagtaacaccaagcaagaaccaccctgctgagcccttcctaaattcctgacccaaaaactcagagggaaactaaaataagccacttcacttggggataatttgttacgcagcaatagataactgaaacactgggtttgcaaactcaaccctcactctaaccctacagcatccagatgtttaatgtaaacagtgagttgggcctggtgcaggtgagcaggtgcggtgggagccctgaggcactggggaacctgtgctgcactgccctgagctgtatgtctccccagatttgttccttgccctcccctttcttcccccatcctaggctgctatttccagtcttccctccagctggggttcaatcaatgggaagctcaggtaggaggctggaggaccagaacaagcagccagggtcattccactccccaagggtcattctcctccttctcctggtagttatgcctcctctagagccccagctcctgccagccagacaatcccactgtgttcccagcttctactaggaaaccttatctctgggctccggtgacaccacctcctccctttgttcctccaacttacggtggaggcagcttccctctgctgctaatttccagtttcttcactgactcccactgggcccctcagctcctccttccctacttaaccatctccatctccaggtgttcatgtccccctgtgtttttgtcattgttgttgttgtttatttatttatttattacagacagtttcgttcagttacccaggttggagtgcagtggtgcaatcatagctcactgcagcttctaactgctaggttcaagtgatcctcctgcctcagccttctgagtagctgggactataggcacaggccaccacacccaggtatttctatttattttatttatttatttattcattttgtagagacaggatttcac[131 bp omitted]tgcgggacatgccatgcagagaatgaaaggtgggtgctgtgtgaacgtgggtacaaggaagttaggctttcactggggtggcacaatggcagctctgaggcaaaggcatcagagcaaaagagaaggaaaagagggagcctgccctgcaaagatctgggagaaccgtgctcccagaagaggaatggctatcacaaagacccaaggcaggaaagagctgggagtgcctgaggaacagggagaaggttgagcaaaaagagcagcaacatggggcaaaaagagcaggatcatggggagatgatacgaggatggagaagttgctgtggtcacaggagccatgggcaggagtttgtgcaaccagtttgtccattacccgatgcacacagcaaatcaagacagccagttgcagctgagaaagaggattagttgtagggtcaacaaataacaacatgggagagaagctcaaattcatctccctcaggaatctggagcaaggattttttttttttttttttttttttgagatggagtctcactctgtcgccaaggctggagtgcagtggcgccatctcagctcactgcaagctccgcttcctgggttcacgccattctcctgcctcagcctcccgagcagctgggaccacaggcgcctgccaccacgcccggctaatttttttgtatctttagtagagacggggtttcaccgtgttagccaggatggtctccatctcctgacattgtgatctgcccgtctcggcctcccaaagtgctgggatcacaggcgtgagccaccacgtggggcaaggatttttaaggatttgggggtgagacaaagtgtggatatcattgttggaagactgccgggtgaagtttagggacatggagaggaagaagcagtattctcatactactggcagtcctctgtgggggtcttcacattggttgctggaatttgggggtctgataaacaactcaagtgatcttttttaaaaaagccttaagattctaatgtcagagatcctgcctgtgggaacaatggagatgcaagtcaattaaatgatcttatgaccctaatgtcagaaatcctatctataggccaggcacagtggctcacccctgtaatcccagcactttgggaggccgaggcaggtggatcacctgaggtcaggagtttgagaccagcctggacaacatggtgaaaccccgtctctactaaaaatacaaaaattagctgggcgtggtggcagatgcctgtaatgtcagctactcagaaggctgaggcaggagaatcgcttgaacccgggaacgagaggttgtagtgagctgacatcatgccactgcgctccagcctaggcaacaagagcaaaactctgtcagaaagaaaggagaggagaggagaggagaggagaggagaggagaggagaggagaggagaggaaaggaagagaaagaaagaaatcctatctataggaacaatgggggtctagtaccacctgacttttagcaacaaggaagtggac[139 bp omitted]gtgaaaccccgtctctactaaaaatacaaaaattagccaggcgtggtggtgggcacctgtaatcccagctactcgggaggctgaggcaggaggatcacttgtacctgggagttggaggttgcagtaagcggagattgcactactgcacttcagcctgggtgacagagtgagactcaaaaaaaaaaaaaaagacagacaggcatggtcggcttgttaacatgcagactgctgggtcccccagagattctggttcagtagatctagaacaacagagaatttgaatttctgacaaattgtcatgtgatgctaatgctgctggcagaggtcacactttgaaaaccactggtctagaaaaacaccttttttttttttgagacagggtcttgttgtctcacccacgctgcagtgcagtggtgcagtcacggctcactgtagcctcaatctcccgggctcaagtgatcatcctgcttcacccttctgagtagctgggactacagggtgcaccatcccacctggctaattttttaaagattttttttttaatatgtggggtctcactaagttgcccaggctggtgtcaaattcccagactcaagcgatcctcctgtctgagactcccaaagtgctaggattacagctgtgagccactgtgtccagccacaagtgaaagtaatttaataaaatatttcacttgaatttaattattttgctaataattaatagatatgctgggcatggtggctcacatctgtaatccctgcactttgggatgccgagccgggtggatcacctgaggctgggagtttgagaccagcctgaccaacatggagaaacctcgtctctactaaaaatacaaaaaattagccgggcgtggtggcacatgcctgtaatcccagctattcgggaggctgaggcagaagaatcgcttgaacccaggaggcggaggttgcggtgagccgagattgtgccattgcactccagcctgggcaacaagagtgaaactctgtctcaaaataataataataacaatactaaatagataatatttatataaacatatccaaaatactatttcaacatgttatcaatattttataaatgactgagctacttttttttttttctttttatttgagaccgagtttctctgtagcccaggctggagtgcagtggcatgatctcagctcactgcaacctctgcctcccgggttcaagttattctcctgcctcagcctcctgagtagctgggattacaggtacatgccatcacacccagctaatttttgtattttcagtagagtcagggtttcaccatgttggccaggctagtctcgaactcctgacctcaaacgatccacccgctttggcctcccaaagtgctaggatcacaggcatgagccgccccacccggcttacattcttttttcctattaagtcttcgaaatccctgtgtatattttatatttgcaacacatcacaattaggacttgtcttcaatagccacatgtgtgactagtggctaccatactggacagcacaggacaggcctggaatggtggccactgttgcggggatagtgagttgaaggtggagacttgcctcttgaatttagcaacgaggatgagctttggcaataaaaagtttcatttttgtgaaatggagagagagagagtatatgaacacttccttcctgaagtttgggtgtggttttaacaccaatagagagatctggctaacaaaactcaaaaccaacaccagatattagcagcacaaaaaaagacaaccacatattatgtcccttctgataggagatcttaatattatccctgaagtatacttaaccccaaactgaatgtgtatctgactcagcctctagatctaccagtttgcaagacatacagaggatggcagaacatattaaaggacaccaagaggggaaaccagtcaaatcagactgagaagagattatttataggtggatagtgtcaaaaagaaaggaaaaaattaaaatttgtaaaaaaaaaaaaaaaaaatcacactttgggaggccgaggcaggaggatcgcttgagctgaagagtttgagaccagcctgggcaacacagtgagaccctgtctctattaaaaaaaaaaaaagtataaaattttggccaggtgcggtggctcacacctgtaatcctagcactttgggaggtcaaggccagagaatcacctgaggtcaggagttcgagaccagcctggccaacatggtgaaaccctggtgcagtggcccatgcctgtaatcccagctactcaggaggctgaggcaggggaatcgcttgaacctgggaggtggaggttgcagtgagttgagatcgtgctattgcactccagcctgggtgacaaaagagagattccatcttaaaaaaaaaaaaaagtataaaattaaaaaattagactgagatgaatgagagggagagggaacagttataaaatagaagacttaaagaggtaacaaacaaatacaatgtacaatgcaggcaccctggtcggattctaatttgaacaagccaacagtttaaagacatttctatgacatttagggaaatttggagacaggatgaatgttaagacactactaaggatttgttggttttttaggtgcgataaaaatgttatagtaatgtttttttaagaaccttatattttagagatacataatggatgaaatcatgtgatgtctgggatttgctttaaactaactttgggggaggtggaataaataaaacaagattggccatatgttgataattgttgaagctgggtgatgggtacttagaggatcattacattattctatttctgtgtacgactgaacattaataaggctttaaaagggggactgctgtgaaaaagagaaaaaagtagggaaattgtgtgttttttccccccaggatcgaagcgcctttaacaggctccacagctgacaaggacgttgggatgcaagagagtgagaaggcgccagggtggctgcagggcacattcaatagtcggtctagctcttgctcccgcggctgccttctctgcagctctggaggctgcagcttctggtcctggaccgggacttaggtccacacccacgtgctgacgtcgggcaggctcagcggcctcccgcgcctgcgcagcaccgcccttttcgggcgcggcgcccagtccctacaccccacaatcccccgcgccgttccggaggcgcgctaggagtgggtgtggcctctgcctccacattggaacaaggtgaggcagagggtgtcgcgtggtcttctgggaaatgtagttcgtctgccaggccggaaccaccgctcaaccggctcgcgagactatgcaccccacaatgcgccgcgcgcgcagcggctaagcgatgcgttgctgcctccacgtggtggctgagtgatcatgctccggtttgggaatggggcccagaagggtagggttaggggcggggacggtgctggggatgctgagggtcgccctggaaacctctgggaagattttccagagggtaagtcccctgaacctggcccacgaaagggtagtagtaatgaagaaattggaggtggggcccgctatgaggaccgaatgacagagcagcacctgttggctgcatatgataatcaggctactgttacacctaagactcacacagtaggcacttcctaggccacttaccgctccctgcgcttcaggtatcttagcccattcaatcctcccagccaccattcgagatattatcagccctcctttctaggagtgaagctgaagcccagaaacgcgaatcacttgctcaaagttattcaacatgtcagtggcagagctgggatttgaactaggctgtcgggctaccaagtctgggctcttcttcataggaatatctcatcaccctattcagttatcctaaaattgtaattagcacatgaatcaagtcaagatggtcattaacatgtgaatctctttgagtcgctgattaccagcgcttgttcctgcccaaatttgtgacttagacctgcttcaggacaaagttgacaatcaacatagatttatagttagcacatgaatcagcacaggtttctgttcacagggatcagatttctgattagcacttgaatcagcagtggtttgtgtcaacagctggagtctttaggttcctgatttgcacagggatctccatccagggattattttcttgcctaaataggcctgttcctttatgtccaggtgaccttctcttcaaatgttgtcccagctgggtgcagtggctcacgcctgtaatcccaacactttgggaggctgaggcgggaagattgcttgggtctgggagtttgagaccaacctgggcaacatagcgagaccccgtgtctccatgaaaaataaaacaattagcctggcatggtggcatgctcctgtagtcccagctacttgagaggctgaggtgggaggatcccttcagcccaggagtttgaggctgcagggagctatgatcatgccactgcatggcagcctcagcgacaaagcaagaccatttctcttaaagaaaaaaaaaaaagggcgggcacagtggttcatgcctgtaatcccagcactgtaatcccaggttgaggtgggcggatcaactgaggtcaggagttcgagaccagtctggccaaca[138 bp omitted]tggtgaaaccccatctctactaaaaatacaaaaattagcagggcatggtggcacgtgcctgtaatcccagctactcgggaggctgaggcagaagaatcgcttgaatccgggtggcggaggttgtagtgagccaagatcatgccactgcactccagcctgggtgacagagcgagactccgtctcaaaataaaaatcagccaagcgtggtggtgcatgcctgtaatcccagctactcaggaggctgaggcaggagaatagcttgaacccaagaggtggaggttgcagtgagccgagatcatgccactgcactccagcctgggcgacagagcaggactctgtctttaaaaaaaaaagagatgggggctgggcgcagtggctcacacctgtaatcccagcactttgggaggccgaggtgggggtatcacctgaggtcaggagttcaagaccagccttgccaacatggtgaaaccccatctctactaaaaatacaaaaattagccgggcatggtggcacatgcctgtaatcccagctactcgggaggctgaggcagaagaatcgcttgaatccgggcggcggaggttgtagtgagcaaagatcacgccactgcactccagcctgggtgacagagtgagactccgtctcaaaataaaaatcagccaagcgtggtggtgcatgcctgtaatcccagctactcgggaggctgaggcaggagaatagcttgaacccaggaggtggagattgcagtgagccgagatcatgccactgcactccagcctgggcgacagagcaggactctgtcttaaaaaaaaagagatgggggctgggcgcagtggctcacacctgtaatcccagcactttgggaggccgaggtggggggtatcacctgaggtcaggagttcaagaccagccttgccaacatggcgaaaccccatctctactaaaaatacaaaaattagctaggcatggtggtaggtgcctgttatcccagctacttgggaggctgaggcaggagaatcacttgaaccaaggaggcagaggttgcagtgagccaagattatgccactgcactacaacctgggcaacaaagtaagactctgtctaaaaaaataaataaataaatagg[140 bp omitted]gcatggtggcagacgcctctagtcccagctactcgggaggctgaggcaggagaatggcgtgaacccgggaggtggagcttgcggtgagccaagatcacaccactgcactccagcctgggcaacagagctagactctgtctcaaaaataaataaataaataaaataataataaaatggggttatttgttttttgcttgttgcattgtttaagtcccttatagactgaattcctctttatgtctctaaatacatttgtctctttggtacacatctgcggtgctacatgccctcaacccaccaggttttagcatagctgttgtggtagacagttccgtgtgcagtgcagatagccctggttcagcccagctgttctcaaaatgtggtccctgaccaggtgtagtggctcacacctgtaatcacaacactttgggaggcctgggagggaggattgcctgaggccaagagttcaagaccagcctgggcagcatattgagaccctgtctctacaagaaattttaaaaattagctggatatggcgatgcatgcctgtagtctcagttactctggagcctgaggtgggaggattgcttgagcccaggaatttgaggttgcagtcaattatgattgcaccaatgtactgggtgacaaagcaagaccctgtctcaaaaaaaaaagtatggtctttgaaaagtcacattagcatcacctgggtactcgttaaaaatgcaaatgtttgggtcccacctcagacccactgaaccagaaactctgaggttgggacctggagatctatggtgcccccgggtgatcctggtgggctgcactgcaaggacacctggcctggctcctgcaaggcaaggcatccctctctgcttttctttctttctttctttcttttaaagacagagtctcactctgtcacccaggctggagtgcaatggctggatctcagatcactacaatctccacctcccgggttcaagcaattctcttgcctcagcctcccgagtagctgggattacgggcgtccgccaccacacccggctaatttttgtatttttagtagagacggggtttctccatgttggccaggctggtctccaacgcctgatctcaaaagatccgcccgccttggcctcccaacgagccgggattacaggcgtgagccaccgcccccggctgtcagtgtgtcttgaggtctttccctaatcccagatggcacaagttttccctcttgcaggcagagaaaggagccttgggaaggagcccctctggcctgaaagatcaagcctattgctgggcatggccaggtaaggaaactccaaccgtggaaaggacattccagggaggtggtgctgagataaggggggcagaaagagacaggtttggggggccagtggctctggaatgaagcgctacactcaaggctaggaatagttactgaatgcacatacacacataccattctcacagcccaggtgctgcgtcttagagcgtgtgagtgtgtatgtgtgtgtctgtgtgtgcgcgcgcacgcacgtctctatctctgtttctgtctttctctgacttgtccttatctcttgtctctccatcactctctgtgtctcgctgtctctgtgcatttccatgtctcgaatatgtgtgtgtttcaatctgtctctctgcctctttccattttctcctctctatccatcaatctaagcctgcccatctttttgtctgcctttctgtatctccgttcttctctgtctctctgtctcagtctctctgtatccagggattctctttcccagcagcgccagtgcgactccatgggaggtggggccggggcgcgtctttgagagaaggggcgggtgcctacgcctttaagcgcgggtgcgcgcggagcctgcgcctttaagcgccggtgcgcgcgctgccctgggttcccggcgaggaggccgcgggagcgcctggacccggcccgcccagcccggcccccgcccggcccccgcctcggccccggcgggggaggggtctctgagcgcggcccctcccccctgcgcccccgcctgcgctgcggtgcccccatcccgcgtgtcccagtctgtctgaccgtccctccgctcccaggcctcgccccacccggccctggggctgcccggtcgcccccctccccaccgcagccggtcccctccctcccagtcagcctccgccgcagcccaggaagccagccgggacgccgccgccccggaccccgcgccctaacctccacctcgggggcctgcacccccagattgaatcgggaattccggaaacccgagcctggaaccctgatctgggaccagcaccccgagatccggccgtggaaccccaagatctggagcctgaaccccagtatatggggctggaatctcaacatcggtcactgggacctcaatatttggagccggaaccccacaatttggaacacagaccccaatatttggagcagaaccccaagatttgacatctaaaacctcaagcctggagctgaactctgaattctgggcctgggaccttgaaatctgggactggatttccagtactgtaccctggaacccactcttggggacctgaaccctgggattcaggcctcaaattccaagatctggactgtgggattccaaggggcctgaacccgagtttgggcctgaagtccttgctgcagacctgagtgcttaaatctggggcttgagacctcccaatcttgactcagcaccccaatatctgaatgcagaaccccgggatcggatctcagactctaaaccccaccgtttggctgcttagcatcccaagactggacctgggagaccctgaccctgaacaacccaaactggacccgtaaaactggaccctagaggcccaatatttaggggtctggaaccccgagtattaaggtctggagactccgttgccacagatttgagccgagtcaggacacagtccctctacagaagccttggggacaggaaaagcatgaccagatgctccctccagagccctgacctctgactcccctggagctaggactctgctccctggggctgcttctagctcaggtaaggctgctgaaacctcaaggtggggacgggctgggaggagcattgtggctgcgggttacggtaccaggtaccctttgacactcttggggtttctccagaaaaaaagacattcccccatgggtctgccttcagctcctgctctgctccaaacactctctggacactggccatccttgcccctctctgaccttccctgcctcagttgatgggacctccaggtctctgacccctgcaacccttacagcctttcgctgtctatccggtccgaccgtctccgccacctctcttgtccaccactcctctctctgggctcctttctccacctgtcctctcaatggccatctctgttccctttttctctctctgatcatctttgtgacacccctgtccacaggtcctctctccagtcgcctctgcctgctgcttctcagtgaccatcgctgacatctgtgtccactgtgcctctctctaatcatcattcaccagctctcttgctccttctccacccctgaatctaagcctaggtctgtgaccgtccccatccatctttgacattgctgtccaccactcttctctccagcagcctctgtccatctctcctctctagcttcctctggccacctttccctttctctggccatctctcccactgctcttgccctcctcccacccctgaccctaactcccagtctgcaactgtctgaccatctctggccacctctcctctctctctcactcactgatgccctctgatcatctctggccacctcttctctctctctcactcattgatgccctcttgatcatctctggccacctcttctctctttctcactcactgatgccctcttgatcatctctgcccacctcttttctctcgctcgctgatgccctctgatcatctctggccacctcttctctctctctcactcactgatgccctctgataatctctggccacctctcctctctcacttgctgatgccctctgatcatctcgaacatctctgctgcctttcctctctccgatgacctctccccgcaccatcctcctgagcagctgtcctgggctcccactgactctgccatgtctgtccttttcctcctctctgaccaccttgctggctttgggccgtttctgaccacgtgtctctgacatggtcatctcccccagatctgagcccaacccatgccctcccttctctttgtccactgctcatcttcctgaccatctgtaaccccttctcttctctggtcatatctgaccacttctgatcattgttgccaccctggctgccccgtctccccatggccagcttttaccatctctgaccacgtctaaagccctctggttttcctgccactcacccagaccagctgtcatttctctgaccatttctttacttttttcttttggagagacagagtcacgctctgttgcccaggctggagtgtggtggcgcaatcatagctcactgcagcctcaaattcttgggctcaaattgatcctcccacctcagtgtcccatgtagctaggaccacaggtgggcgccaccatgcctagctaatttttaaaaatttttgtataatagatacacggtctcactttgttgcccaggctggtcttgaactcctggcctcaagccatcctcctgcctcagcctccccaaatgctgggattacatgtgtgagccaccgcgcctggccttcctctggcttttggtcacatctgacggtctttgaccagcccttctgccctcagcccactgtgaccttctctcctggtctcagaccacccccagcccctgcagaacccctcttctgccctcacgcctcccctcttctccgcaggacacccctgcccgcgatggccatcctcccgttgctcctgtgcctgctgccgctggcccctgcctcatccccaccccagtcagccacacccagcccatgtccccgccgctgccgctgccagacacagtcgctgcccctaagcgtgctgtgcccaggggcaggcctcctgttcgtgccaccctcgctggaccgccgggcagccgagctgcggctggcagacaacttcatcgcctccgtgcgccgccgcgacctggccaacatgacaggcctgctgcatctgagcctgtcgcggaacaccatccgccacgtggctgccggcgccttcgccgacctgcgggccctgcgtgccctgcacctggatggcaaccggctgacctcactgggcgagggccagctgcgcggcctggtcaacttgcgccacctcatcctcagcaacaaccagctggcagcgctggcggccggcgccctggatgattgtgccgagacactggaggacctcgacctctcctacaacaacctcgagcagctgccctgggaggccctgggccgcctgggcaacgtcaacacgttgggcctcgaccacaacctgctggcttctgtgcccgccggcgctttttcccgcctgcacaagctggcccggctggacatgacctccaaccgcctgaccacaatcccacccgacccactcttctcccgcctgcccctgctcgccaggccccggggctcgcccgcctctgccctggtgctggcctttggcgggaaccccctgcactgcaactgcgagctggtgtggctgcgtcgcctggcgcgggaggacgacctcgaggcctgcgcgtccccacctgctctgggcggccgctacttctgggcggtgggcgaggaggagtttgtctgcgagccgcccgtggtgactcaccgctcaccacctctggctgtgcccgcaggtcggccggctgccctgcgctgccgggcagtgggggacccagagccccgtgtgcgttgggtgtcaccccagggccggctgctaggcaactcaagccgtgcccgcgccttccccaatgggacgctggagctgctggtcaccgagccgggtgatggtggcatcttcacctgcattgcggccaatgcagctggcgaggccacagctgctgtggagctgactgtgggtcccccaccacctcctcagctagccaacagcaccagctgtgaccccccgcgggacggggatcctgatgctctcaccccaccctccgctgcctctgcttctgccaaggtggccgacactgggccccctaccgaccgtggcgtccaggtgactgagcacggggccacagctgctcttgtccagtggccggatcagcggcctatcccgggcatccgcatgtaccagatccagtacaacagctcggctgatgacatcctcgtctacaggtgcagggtccaggcactggggtagcttgggtgggggagtgaggcaaggggagggttgagggtacacctactaataccctacaccgaagcacaactgataagtgatgctggaaggttccaaaagaaatcagagagcaaaagtaaaagaaatcaggcagcaaggataacaagactctggcagaaagggtcaatgaaatctgacagcagtgataaaaagaagtcagacaagaaggacgaagtaaatgagacagcaaatgttaaaatatatcaggctacagggctaaaaaagatcaagcaataaggataaacgaaatcaggctgcatgagtaaaaagaaattaggcagcaagaataaatagtagtagcaaacataaaaaggaaaccaggcagcgggaggagaaagtaatcagggcagaagaataaaatgttaatgggcaagggtgggtggggaagataaggggataaaaataaatttaagttgtaaagataaagagagaaacaccaggttttccagatgacaggactagatactagctgggctgcaggaagaaaaggagatcaaacaggaaagcacagggagcccagaaacaatgaaataagcagctctgttagaaaaagaaatcagaccagaggttagaaggaaattgcagggaggaggttcgatagagactgggcttcggtgtgtgtggtgtgaactattccatgtttcaagttctaatatagtgacatccagatttttttttttttgagacagggtctcactttgtcgcccaggctggagtgcagtggtgcaatctcggctcactacaacctccacttcccgggttcaagcgattcttgtgcctcagcctctcgagtagctgggattacagacgtgcaccagcacgcccagctaatgtttgcattttatttttagtggagacggggttttgc[135 bp omitted]agtctcactctgttgcccaggctggagtgcagtggcacaatcttgactcactgcaagctccgcctcccaggttcatgccattctcctgcctcagcctcccgagtagctgggactacaggcgcccgtcaccatgcccggctaattttttgtatttctagtagagatggggtttcaccatgttagccaggatggtctcgatctcctgacatcgtgatccacccgcctcggcctcccaaagtgctaggattacaggcctgagccaccgcgcccgacagattttttattttctaaatcaaatcaaacctagttcaagttccttttgccaggtaaacagaaatatccagtttgccacacttgtgggggattctcttctctctcctgttgttgcaaacacagaacctggggtttacacactccaagaggtggctcagtccaacttgttcccccaagctggagagcactcagcacatctgcagtgaccgcatgtggtcagcagtggtggctgctgacctaggtgctgttgacacctcttaccaaagtccaaccttgcatggatggactgcggctgtgggtgagtccctgtcctcacggccaggctgggccaagggtgcagccccaaggctgactgtaaagactggacctccccagggttgaggactgttccttggggacctagtagtacctggatgtcctttccctcccttggggccaacacctcaagaaaaggccacttgatttccatttcagtcctggcaacccactgagctcattctactccctttctcagacatgactcggaagattgcacggaagtcctgcccctgaaaatcacacaagtcggccaggcgcggtggcttaacccctataatcccagcactttgggaggccgaggcaggtggatcaccaggtcaggagtttgagaccatcctggctaacacggtgaaacctcgtctctactaaaaatacaaaaaattagctgagtgtggtggcacgcgcctgtagtcccagctactcaggaggctgaggcaggagaattgcttgaacctgggaggcggaggttgcagtgagccgaggctgtgccactgcactccagcctgggtgacagagtgagactccgtctcaaaaaaaaaaaaaaaaagtcacacaagtcctggccaccttgccaggtggggaatgggatgaatgctgtcctagacagtcaccctgccccaggcggccacggagttccctgtacctctctcattagaatagcctaggaataaaacaggtgataagtcaactctccaacagggtgcccaactacaaaagaaactatagtgaaattgggtggtaaggattaaaaggaaacaagaaagaaaaagataaatagaaaccagccaacagagataaaagagaagcaggtgacagagccggaaagaaataaggcaacagggagaaaaagaaagcagtagtgacggaggcacattagtttaatgaaaagggaatcagacgacaggactcattggaaaacaggctatcaatacagtcatcataataaggcaatagggctagggggacatttattggcaggttacaaggaaatcgggcaacaggggtacagggagatcaggtggtttgattggagagaatcctagctgtacactagaggaaaatcaggcagctggaaaagggaaatttggcataggctgcaggaaataggggaaccagagggaaattggcaagcgtctggaggagactgggaggtaaaatgtgggggaaattggatgggggtggctagaagacaaaaggattaaattagatggaaattggacagggttagagcagaattgggtggtgaactggagagatgactggcagtgggaccagagtgaaatcaggcagaggattggggcaaaattgggcagggaggctagagcggagctgggctgcaggctggagggaaattgagtgggcagtgcaaaagggaaattgggcagttgggtataaaatgaaaccggcaaggtgtggtggctcacgcctgtaatcccaacacttaaggaggccaaggcaggaggctggactgccttgaggccaggagtttgagaccagcctgggcaatatagcaagagcctgtctctacaaaaaatttaaaaattagctgggcatggtagtgcacacctgtagttcctgctactcaggaggctgaggccggaggatggcttgagtccaggagtcagaggctgcagtgagctgtgatcatgccactgcactccagcttgggcaacagagcaagaccctgtctataagaaaacagaaagaaagaaagaaaagaaacaggatggattggaagaactcacgtggtgagctgttagagaaattgggtggtgggactagagtgaaaatgggcagcaggctatgaggacgtgtgagagggtgggctagagtgaaattggccaacagactggaggggtatcagtcaggtggctgaatgggatgtcagaccaaagggaattgggatgttggtgagagggagctcattgggtagaatgaaatgaaggagtggactggtgggaagtctagccccgcagggagtttggtgggggaagcacaggttgggggctgggcagcctgagacctgacccccacctgcctgccctgcaggatgatcccggcggagagccgctcgttcctgctgacggacctggcgtcaggccggacctacgatctgtgcgtgctcgccgtgtatgaggacagcgccacggggctcacggccacgcggcctgtgggctgcgcccgcttctccaccgaacctgcgctgcggccatgcggggcgccgcacgctcccttcctgggcggcacgatgatcatcgcgctgggcggcgtcatcgtagcctcggtactggtcttcatcttcgtgctgctaatgcgctacaaggtgcacggcggccagccccccggcaaggccaagattcccgcgcctgttagcagcgtttgctcccagaccaacggcgccctgggccccacgcccacgcccgccccgcccgccccggagcccgcggcgctcagggcccacaccgtggtccagctggactgcgagccctgggggcccggccacgaacctgtgggaccctagccaggcgcccccccctctaagggtcctctggccccacggacagcaggacccggacaccctgtgggacctggcctcaaactcaccaaatcgctcatggtttttaaaactctgatggggagggtgtcggggacaccggggcaaaacaagaaagtcctatttttccaagcttgggcgaagacccttgccctcgtctctgtctatgggggttgggggacggagcaggggtctggagctggggaatgcctcctttggggagacaccccctccccgcccagttcagtctgaggaccccggaggaggctgaggatggcgatccattcagacaatagatgttccctgcgtgtcggctctgagcatgccctgggttgggggatgctgtggtgatccagatagccctgagccctgcccgcaggggcctaaagtcaaatgggagacagacacatccccagacagtgatagcacagagtgaccagggatgtggggatgagggaagcctgggggattgtgacagtccagaagaggtacccttgctcagccccaggtgtggtcagggagggcttcctggaggaggacacatgtgatctgagaatgacatatgaaggagataactgggcaaagagcagaaggaaagctctttcaggcagagggcacagcacaagcaaggtggtggtgtgccctgggcactgggggtgctatggtagaggtgaggcaggagggttgagcagggtctaggacctccaggctgaggagctcagactctggcctgatgataccagggagccatggagggttgtatgcaagggaggaatggggtcagtttggggcttcaggaagatccttctagtgctatgagtagggtggacccaaggggaagactgaagctgggagccccaggggaagctggggcagggacctgggtgggtgaggacgaagttggaccagctgggctagggaacaagaaaagggagtgggttgacagagacactcgggaaactgtgggaagctgaggcggtgggttatggagctgcggggccatggggtggggcaggaagatggtggggactgccctcatataggaccagggaggaggagcaggtttgggaaagatgatatggccagtggggaacttggtaggtgtagggggccctgaggatgtccaggatgtggcattcaggagggtgcaggacccctggtctgaggctgaagctggaaatagaaatgagggctttgtcagcagagatgggaactgacgctgctggggttaagacggcttcttgtgggggatgattccaagtccccactatgggacattttttcttttttcttttttttttttacagatggggtctcactatattgcccaggctgatcccaaactggcctcaagtgatcctcccgtctcagcctcctgaattgctgggattacaggcatgagccactgcccctggctagggactttccatatttaagggtgacgcaaagaaaaacctaaccaagactaaacaggaccagcaggcagagggacagggggaagaagaccaagcaattcagacccaagaaactcttgtgttcaatgatataaataaaggctgcggtgaccccccagagagcagtgttagggggtcagttggggcagatggcagattcagctgatttgagaggagggggtaagaaaatgtagctagagggtgcagcccctgtcaacctgtgggcctggagtcccatgtctttgcagggtgggtccttactctgtcttgggcagccctaggccccatgagacaccaagcctggaggtttgcagaaccaaaccccggtctaggagatgttgagcctccttggagatccaggaacggggttggcagtaagaggaatagcaccccctgaactcagggcttcactaatgatgtccccagaggcaggagagtggagggaagctgggtcctgtcacctggagggacactggtgtgagggcatggtaaagagagcccaagactgaactggcccttttcatgacctggggcacatgattgtgacctcgtgggatgacatatcctagattctgccacagcttttctggggggtctaggccttgaacatgttatgccatgagtcatgggaccagcctgagtcctgggggacctcgtctgaccacaccctactccccaagtccccagcagtatcatgagatccttcttgttgtttgttagccttggacagctgaagtcaggtgacgtcatcaagaagagtgagggcatgagtcctggggaaaggggcctaggagcaggggcatagtgtttcgagactgtggtcccagctactcgagaggctaaggtgggaggattgcttgagcccaggagttcgaggctgcagtgagctaggattgcgccactgcactgagcccaggagttcgaggctgcagtgagctaggattgcgccactgcactccagcctgggccacagaacgacaccctgtctccaaaaaaacagaaaaggagcctaggaagtgaggatgctgggggcctagtgctggctacaattaccagttgctcccatgagggggagccagagggcactgttcgtgtgtgtgtgtgtgtgtgtgtgtgtgtgtgtgtgtgtgtcgaagtctcttgtcgcctaggctggagtgcaatggcgcgatctccgctcactgcaacccccgcctcctgggttcaagcgattctcctgcct[450 bp omitted]ccacacccagctaatttttgtatttttgtagagatgggggtctcactgtgttcccatactggtcttgagctcctgacctcaagtggtcctcccaccttggcctcccacagtgctgggattacagatctgaccgtagatgttaaataatcacaccagcaagtgtaagcatctgcagtgaccaaggggcgccatgcaggagacacatacagaagtgcgcgaccctgtaaccaggggccctgacccaacaagagagattgaggaaggcttcctggaggaggggaggcctggcggagacctgaaggatgcgcaggttggagttaaccatgaaaggggtgggaagggtattccgtgcaaatggaagagcctgtgctgagggaagcatgagtgaaagagctgaggccagggggctgaagtaggggagggaagggaagagagtgaccttgggttgaggctggaaagcaggaagggagccgatgacgcaggaccccgtaggctgctgggaggagtgtggattgtcctctaagtggcatgagaagccattgaagggttttttggttttttttttttttgagacggagtctcgctgtcgcccaggctagagtgcagtggcacaatcttggctcactgcaacctccgctacccgggttcaagtgattcttctgcctcagcttcccgagtagctgagattacaggtgccctgccacgacgcccagctaatttttgtatttttagtagagacttcttcaccatgttggccaggctggtctcgaactcctgacctcatgatctacctgcctcggcctcttaaagtgttgggattacaggcggcatgagccaccccgcctggcccattgaagggttttgaggtctaatgagagtagcagtccctgatctcaaggaagctctgtggggaggaggatactgcaatagtccaagcagaagggtgatccggaccaagttggggcctgaagtggttgaagagagatttgagacgaccttactagaggcctctgccccccacccagcagacagtgtgccctactgtacagctacccagttctgcagcaagattgcagagatgggaagaagagttgtaagacactgggctctgatatccacagctccaccccttagatgggggagggacttctgtgtagcatgggaatgacggaccttttccaggctcaagtagcaggcagacagtggatggaggctgagaggcagtgggtggtcagggggaatgtggacacaggaaatgcagggctggaagggggacacacacttggtagtagcttattacaaatatggaagcaggaaggatgggaggagggcagactggtccctctagcatgggtcccccatgttcccccacagcatgcctggaccacccccacccgcctgcagaaacacacaatcacatgtgtctaggatttaaagttaaaattttgcttgtcagctaggcacagtggctcatgcctgtaatcccagtgctttgagaggccaccctcagggaggattgcttgagcccaggagttcaagaccagcctgttttcaactccgtggaccctgtgaggcacacttcactctccccagccctctggataaaacagtagttccttaggaactttaacttcccccaaaatgctgtggcctcccaggcaacatagccataccccatctctacaaataataataataattagcttgtccaactgcctagctaagtccatcaatttcctgagctcagggagtacaactacttctactgtcaattcctcatcaattcctcatctgcttttggccccacacattttttagaccaaagctccggctgctggagcattatcttgaagtgactgtagacccaataccaggattctgccctgtctgtgtactgccagatccaacccatgtgtcttggggtggctaaatctgacaaaggccctgagtgtctggggacacctgtgatctcctgcaaggctgaggctaatgccacgcttttgcagctctttgcatgggcacatatgtgagagaatcagataaaaggtgttcccaaaaaggatgtttgtgttcagggtggaacctgacgcctgcctcctgcctttgggtcctccctgatggctgtgccctctcatacctcgcaaaagcaaagataggtatcagtgctgcctgtcgtcctgacctgtgcggagtgacgttgggaacattgtggtgaccaacacagccctagcccttgccctcagagttccagttcaaggctgggagcagtggctcatgcctgtaatcccaacactttgggaggccgaggcaggtgggtcacttgaggtcaggagttcgcaaccagcctggccgacatggtgaaaccccaactctactaaaaatacaaaaattatccgggtgtgatggcaggcacctataatcccagctacctgggaggctgaggcaggagaatcacttgaacccgggaggcagaggttgcagtgagccaagattgggccactgtagtctagcctgggcaacagagcgagactccgtcccaaaacaaaccaacaaaaaagagttctatttccagtggaggaaatagataatcacaaaacaatggcatcccagagtggtcggggatggggaaagaacaggcaagaatgatcagggcttttgcagaagcccaggggactcccagagccagagggttctacacttgatcttagccaaaaggccaagaagcaatctgaagtttctaactgggcctgggatgggaggtggggagacagtccaagatttcctgaggcagggccagctttatggcagtgtgactgtggggttgcaccatgccccaaacttagaagtaccctatgcttgctttaatgccctagtgtcactatcttgaaattaataatttttgaacaagggccccacattttgattttgcactgcgccctgcaaattatgtagccagtcctgcccggaggagcgaacacttgagggatttacagagagagccgaggcagagagggtcttcccaggagagagagcattgggtacaaaagccaagagagggccaggcgcagtggctcatgcctgtaatcccagcactttgggaggctgaagcgggcgaatcacctgaggtcaggagttcaaaaccagcctggcaaacatggcgaaaacccgtctctactaaaaatacaaagaattacctggacgtggtgtcaggaacctgtaatcccagctacttgggaggctgaggcaggagaatcgcttgaacttggaaggcagaggttgcagtgagcccagatcctgccaccgcacactagcctgggtgacagagtgagattccgtctcaaaaaaaaaaaaaaagaaaaaagagaggactgcacactcaaagaatgagccagagttcagtgtggctggcgcaccatgggagaagggcgcactgtggggccatggagggtggagggtgataaggtggagggacagggtcaggtttgcactttagaaaaatccatctggcagctgggcgcagtaactcacacctgtaatcccagcactttgggaggccaagacgggcggatcacctgaggtcgggagttcgagaccagcctgaccaacatggagaaaccctgtctctactaaaaacacaaaattagctgggcgtggtggcacatacctgtaatcccagctactcgggaggctgaggcaggagaatcgcttgaacccaggaggcggaggttgcggtgagccaagattgcaccattgcactccaacctgggcaacaagaatgaaactccatctcaaaaaaaaaaaaaaaaagaaagaaagaaagatccatctagctaccatggggagggtggatgggggcacaaggccagggagaagatgggggactcagctgcctgtggaaggagctgggagtgtgggtgattctgaggaggagaggccagcatgggcacgtttaccagaaccttgggtaatagacatcccagtgcaggagacgagctgggagaccccaaaaccacgggatgaacccagagcctcattttcacttgcaaatgtttaccgtgggtggcgggggatgcagaagggtaggttacagaatgtcactcactggtaagtacttgaaaatctttttatatgaaaactcgcatggatagactgatggaggtgaatgcaaaattggcaagaatttcgagtataaaatgtgagatttcaaaggactttcttctggatatgttctggcttcaactccatagacccccggggtgcacttcactctccccagccctctgggtaaaacagcagttccttgggaacttcctcttcagcttcccctaaatgctgtggcctcggggagctgggaatgagccccttcctgcctctgtactcacattcagggacatcgacccctaacacctgtttttcttctctgttggcaaccttcatatttcttttcttttctttctttttttttttttttttttttgagatgaagtcttgctgtgttgtccaggctggattgcaatggcgagatctcggctcaccacaacctccgcctccctggttcaagtgattctcatgcctcagcctcccgagtaggtgggactgcagacgtgtgccaccaagcctggctaatttttgtatttttagtagagacggggtttcaccatgctggccaggctggtctcaaactcctgaccttgtgatcctcccgcctcagcctcccaaagtgttgcaattacaggcctgagccacctcaccaggctacaacctccatatttccatcctcaaccccagcatctctcctaagtccagacctggcttacctcagtttcccggacccctcttcctggacatcccctggggcccctcacacccactggatcccacacccacctcggcttcttctcggacctatgcctccttctaggtcctgtctgggagagcaacccccatgcagcctcctgaatgtcccccacctccccttcctccctgccccggccccatcctgggctagttctggcctcacccatctgggtccttgcactgggctcctggcctcagtctcttctctggtccaggatcttcctaaagccaaaccctcctctgtataggcacccccatggctccccagggttcctgggacagtctgagctcctcagcctctagcatcccagcccttcccacgccatccctcttccccagctctgtttctagcacatatgtttgttccccacctcaggcaggaaggaaacactaaccacatcctctgcttgtgatgaaggaggatcttaagcaagtgacagatgaagctattgaaggaaagtgggttccagctgggcgtggtggctcatgcctgtaatccctgcactttgggaggccgagttggatagatcacttgaggccaggagttcgagaccagcctggccaacatggtgaaaccctgtctctactaaaaatacaaaaattacttgggcgtggtggcacgtgcctgtggttccagctaccccggaggctgaggcaggagaatcgcttgaacccaggaggcggaggttgtagtgagccgagatcgccccattgcactccagcctgggcaacagagtgagactctgtctcaagagaaaaaaaaagaaagaacatgggttccttcttgaatgctccccttattcctcccaccaaaggtaacgttctgggggagaaggaggcctgggtgcagctactagcatctgggggagaggcagttggtaactgtacccagggtcccttgcttctccatttctggagatccatccttgccctcctctccgagatcctcctagaaggctgtagctccattgttctcagcttctgggaagccgagaggacgttctgggaagaagaaagtgatgtataggccattgttttctcacgggaacctctgtccccaaatcctccagacctccacatccaggcacctggtgccctctcctgcctctgtctctggtcacttccacaatccaggagcccaggcgtctagcttcctccttcctcaggagttcaggtctgcagtcccctccttcctcaggcacagaagccccatctccactcccctccatcctcagaacacaggctcccggcccccttcct[137 bp omitted]cggtgaaaccctgtctctactaaaaatacaaaaaaattagccgggcctggtgacgggcgcctgtagtcccagctactccggaggctgaggcaggagaatggcctgaacccgggaggcggagcttgcagtgcgcggagattgcactactgcactccagcctgggccacagagcgagactccgtctcaaaaaataaaaataaaaaaaacttctctctcagcaggctcaggagtcctccccctccccgcactggccctgccacctcttttctaatttatctatttattttttattttttttgaggcagagtctcgctatgtcacccaggctggagtgcagtggcacaatctcagctcactgcaacctctgccaggttcaagcaattctcctgcctcagccttccaagtagctgggactacaggcacccgctaccacgccaggctaatttttttgtatttttagtagagatggggtttcaccgtcttagccaggatagtctcgatctcctgatctcgtgatccacccgcctcggcctcccaaagtgctaggattacaggcgtgagccaccgcgcctggccttacttttttatttttagagactgggcctcactctgtcacccaggccagagtccagtggcaccatctcagttcagtgcagccttgatctccctgggtcaagcaatcctcccacctcagcctcccaagtagctgggaccacaggtgtgtgccaccacacccggctgtgcccctcttgtcttaggatggtctt

SEQ ID NO: 1018 - DNA, 2495 bp, Homo sapiens
tctctgagcgcggcccctcccccctgcgcccccgcctgcgctgcggtgcccccatcccgcgtgtcccagtctgtctgaccgtccctccgctcccaggcctcgccccacccggccctggggctgcccggtcgcccccctccccaccgcagccggtcccctccctcccagtcagcctccgccgcagcccaggaagccagccgggacgccgccgccccggaccccgcgccctaacctccacctcgggggcctgcacccccagattgaatcgggaattccggaaacccgagcctggaaccctgatctgggaccagcaccccgagatccggccgtggaaccccaagatctggagcctgaaccccagtatatggggctggaatctcaacatcggtcactgggacctcaatatttggagccggaaccccacaatttggaacacagaccccaatatttggagcagaaccccaagatttgacatctaaaacctcaagcctggagctgaactctgaattctgggcctgggaccttgaaatctgggactggatttccagtactgtaccctggaacccactcttggggacctgaaccctgggattcaggcctcaaattccaagatctggactgtgggattccaaggggcctgaacccgagtttgggcctgaagtccttgctgcagacctgagtgcttaaatctggggcttgagacctcccaatcttgactcagcaccccaatatctgaatgcagaaccccgggatcggatctcagactctaaaccccaccgtttggctgcttagcatcccaagactggacctgggagaccctgaccctgaacaacccaaactggacccgtaaaactggaccctagaggcccaatatttaggggtctggaaccccgagtattaaggtctggagactccgttgccacagatttgagccgagtcaggacacagtccctctacagaagccttggggacaggaaaagcatgaccagatgctccctccagagccctgacctctgactcccctggagctaggactctgctccctggggctgcttctagctcaggacacccctgcccgcgatggccatcctcccgttgctcctgtgcctgctgccgctggcccctgcctcatccccaccccagtcagccacacccagcccatgtccccgccgctgccgctgccagacacagtcgctgcccctaagcgtgctgtgcccaggggcaggcctcctgttcgtgccaccctcgctggaccgccgggcagccgagctgcggctggcagacaacttcatcgcctccgtgcgccgccgcgacctggccaacatgacaggcctgctgcatctgagcctgtcgcggaacaccatccgccacgtggctgccggcgccttcgccgacctgcgggccctgcgtgccctgcacctggatggcaaccggctgacctcactgggcgagggccagctgcgcggcctggtcaacttgcgccacctcatcctcagcaacaaccagctggcagcgctggcggccggcgccctggatgattgtgccgagacactggaggacctcgacctctcctacaacaacctcgagcagctgccctgggaggccctgggccgcctgggcaacgtcaacacgttgggcctcgaccacaacctgctggcttctgtgcccgccggcgctttttcccgcctgcacaagctggcccggctggacatgacctccaaccgcctgaccacaatcccacccgacccactcttctcccgcctgcccctgctcgccaggccccggggctcgcccgcctctgccctggtgctggcctttggcgggaaccccctgcactgcaactgcgagctggtgtggctgcgtcgcctggcgcgggaggacgacctcgaggcctgcgcgtccccacctgctctgggcggccgctacttctgggcggtgggcgaggaggagtttgtctgcgagccgcccgtggtgactcaccgctcaccacctctggctgtgcccgcaggtcggccggctgccctgcgctgccgggcagtgggggacccagagccccgtgtgcgttgggtgtcaccccagggccggctgctaggcaactcaagccgtgcccgcgccttccccaatgggacgctggagctgctggtcaccgagccgggtgatggtggcatcttcacctgcattgcggccaatgcagctggcgaggccacagctgctgtggagctgactgtgggtcccccaccacctcctcagctagccaacagcaccagctgtgaccccccgcgggacggggatcctgatgctctcaccccaccctccgctgcctctgcttctgccaaggtggccgacactgggccccctaccgaccgtggcgtccaggtgactgagcacggggccacagctgctcttgtccagtggccggatcagcggcctatcccgggcatccgcatgtaccagatccagtacaacagctcggctgatgacatcctcgtctacag

SEQ ID NO: 1019 - protein, 466 aa, Homo sapiens
  VARIANT (1)...(466): Xaa = Any Amino Acid
MAILPLLLCLLPLAPASSPPQSATPSPCPRRCRCQTQSLPLSVLCPGAGLLFVPPSLDRRAAELRLADNFIASVRRRDLANMTGLLHLSLSRNTIRHVAAGAFADLRALRALHLDGNRLTSLGEGQLRGLVNLRHLILSNNQLAAAGALDDCAETLEDLDLSYNNLEQLPWEALGRLGNVNTLGLDHNLLASVPAGAFSRLHKLARLDMTSNRLTTIPPDPLFSRLPLLARPRGSPASALVLAFGGNPLHCNCELVWLRRLAREDDLEACDPALGGRYFWAVGEEEFVCEPPVVTSPPLAVPAGRPAALRCRAVGDPEPRVRWVSPQGRLLGNSSRARAFPNGTLELLVTEPGDGGIFTCIAANAAGEATAAVELTVGPPPPPQLANSTSCDPPRDGDPDALTPPSAASASAKVADTGPPTDRGVQVTEHGATAALVQWPDQRPIPGIRMYQIQYNSSADDILVYX

SEQ ID NO: 1020 - DNA, 3035 bp, Homo sapiens
cttgggaaggagcccctctggcctgaaagatcaagcctattgctgggcatggccagtcagcctccgccgcagcccaggaagccagccgggacgccgccgccccggaccccgcgccctaacctccacctcgggggcctgcacccccagattgaatcgggaattccggaaacccgagcctggaaccctgatctgggaccagcaccccgagatccggccgtggaaccccaagatctggagcctgaaccccagtatatggggctggaatctcaacatcggtcactgggacctcaatatttggagccggaaccccacaatttggaacacagaccccaatatttggagcagaaccccaagatttgacatctaaaacctcaagcctggagctgaactctgaattctgggcctgggaccttgaaatctgggactggatttccagtactgtaccctggaacccactcttggggacctgaaccctgggattcaggcctcaaattccaagatctggactgtgggattccaaggggcctgaacccgagtttgggcctgaagtccttgctgcagacctgagtgcttaaatctggggcttgagacctcccaatcttgactcagcaccccaatatctgaatgcagaaccccgggatcggatctcagactctaaaccccaccgtttggctgcttagcatcccaagactggacctgggagaccctgaccctgaacaacccaaactggacccgtaaaactggaccctagaggcccaatatttaggggtctggaaccccgagtattaaggtctggagactccgttgccacagatttgagccgagtcaggacacagtccctctacagaagccttggggacaggaaaagcatgaccagatgctccctccagagccctgacctctgactcccctggagctaggactctgctccctggggctgcttctagctcaggacacccctgcccgcgatggccatcctcccgttgctcctgtgcctgctgccgctggcccctgcctcatccccaccccagtcagccacacccagcccatgtccccgccgctgccgctgccagacacagtcgctgcccctaagcgtgctgtgcccaggggcaggcctcctgttcgtgccaccctcgctggaccgccgggcagccgagctgcggctggcagacaacttcatcgcctccgtgcgccgccgcgacctggccaacatgacaggcctgctgcatctgagcctgtcgcggaacaccatccgccacgtggctgccggcgccttcgccgacctgcgggccctgcgtgccctgcacctggatggcaaccggctgacctcactgggcgagggccagctgcgcggcctggtcaacttgcgccacctcatcctcagcaacaaccagctggcagcgctggcggccggcgccctggatgattgtgccgagacactggaggacctcgacctctcctacaacaacctcgagcagctgccctgggaggccctgggccgcctgggcaacgtcaacacgttgggcctcgaccacaacctgctggcttctgtgcccgccggcgctttttcccgcctgcacaagctggcccggctggacatgacctccaaccgcctgaccacaatcccacccgacccactcttctcccgcctgcccctgctcgccaggccccggggctcgcccgcctctgccctggtgctggcctttggcgggaaccccctgcactgcaactgcgagctggtgtggctgcgtcgcctggcgcgggaggacgacctcgaggcctgcgcgtccccacctgctctgggcggccgctacttctgggcggtgggcgaggaggagtttgtctgcgagccgcccgtggtgactcaccgctcaccacctctggctgtgcccgcaggtcggccggctgccctgcgctgccgggcagtgggggacccagagccccgtgtgcgttgggtgtcaccccagggccggctgctaggcaactcaagccgtgcccgcgccttccccaatgggacgctggagctgctggtcaccgagccgggtgatggtggcatcttcacctgcattgcggccaatgcagctggcgaggccacagctgctgtggagctgactgtgggtcccccaccacctcctcagctagccaacagcaccagctgtgaccccccgcgggacggggatcctgatgctctcaccccaccctccgctgcctctgcttctgccaaggtggccgacactgggccccctaccgaccgtggcgtccaggtgactgagcacggggccacagctgctcttgtccagtggccggatcagcggcctatcccgggcatccgcatgtaccagatccagtacaacagctcggctgatgacatcctcgtctacaggatgatcccggcggagagccgctcgttcctgctgacggacctggcgtcaggccggacctacgatctgtgcgtgctcgccgtgtatgaggacagcgccacggggctcacggccacgcggcctgtgggctgcgcccgcttctccaccgaacctgcgctgcggccatgcggggcgccgcacgctcccttcctgggcggcacgatgatcatcgcgctgggcggcgtcatcgtagcctcggtactggtcttcatcttcgtgctgctaatgcgctacaaggtgcacggcggccagccccccggcaaggccaagattcccgcgcctgttagcagcgtttgctcccagaccaacggcgccctgggccccacgcccacgcccgccccgcccgccccggagcccgcggcgctcagggcccacaccgtggtccagctggactgcgagccctgggggcccggccacgaacctgtgggaccctagccaggcgcccccccctctaagggtcctctggccccacggacagcaggacccggacaccctgtgggacctggcctcaaactcaccaaatcgctcatggtttttaaaactctgatggggagggtgtcggggacaccggggcaaaacaagaaagtcctatttttccaagcttgggcgaagacc

SEQ ID NO: 1021 - protein, 620 aa, Homo sapiens
MAILPLLLCLLPLAPASSPPQSATPSPCPRRCRCQTQSLPLSVLCPGAGLLFVPPSLDRRAAELRLADNFIASVRRRDLANMTGLLHLSLSRNTIRHVAAGAFADLRALRALHLDGNRLTSLGEGQLRGLVNLRHLILSNNQLAAAGALDDCAETLEDLDLSYNNLEQLPWEALGRLGNVNTLGLDHNLLASVPAGAFSRLHKLARLDMTSNRLTTIPPDPLFSRLPLLARPRGSPASALVLAFGGNPLHCNCELVWLRRLAREDDLEACDPALGGRYFWAVGEEEFVCEPPVVTSPPLAVPAGRPAALRCRAVGDPEPRVRWVSPQGRLLGNSSRARAFPNGTLELLVTEPGDGGIFTCIAANAAGEATAAVELTVGPPPPPQLANSTSCDPPRDGDPDALTPPSAASASAKVADTGPPTDRGVQVTEHGATAALVQWPDQRPIPGIRMYQIQYNSSADDILVYRMIPAESRSFLLTDLASGRTYDLCVLAVYEDSATGLTAWVGCARFSTEPALRPCGAPHAPFLGGTMIIALGGVIVASVLVFIFVLLMRYKVHGGQPPGKAKIPAPVSSVCSQTNGALGPTPTPAPPAPEPAALRAHTVVQLDCEPWGPGHEPVGP

SEQ ID NO: 1022 - DNA, 2963 bp, Homo sapiens
cccaggaagccagccgggacgccgccgccccggaccccgcgccctaacctccacctcgggggcctgcacccccagattgaatcgggaattccggaaacccgagcctggaaccctgatctgggaccagcaccccgagatccggccgtggaaccccaagatctggagcctgaaccccagtatatggggctggaatctcaacatcggtcactgggacctcaatatttggagccggaaccccacaatttggaacacagaccccaatatttggagcagaaccccaagatttgacatctaaaacctcaagcctggagctgaactctgaattctgggcctgggaccttgaaatctgggactggatttccagtactgtaccctggaacccactcttggggacctgaaccctgggattcaggcctcaaattccaagatctggactgtgggattccaaggggcctgaacccgagtttgggcctgaagtccttgctgcagacctgagtgcttaaatctggggcttgagacctcccaatcttgactcagcaccccaatatctgaatgcagaaccccgggatcggatctcagactctaaaccccaccgtttggctgcttagcatcccaagactggacctgggagaccctgaccctgaacaacccaaactggacccgtaaaactggaccctagaggcccaatatttaggggtctggaaccccgagtattaaggtctggagactccgttgccacagatttgagccgagtcaggacacagtccctctacagaagccttggggacaggaaaagcatgaccagatgctccctccagagccctgacctctgactcccctggagctaggactctgctccctggggctgcttctagctcaggacacccctgcccgcgatggccatcctcccgttgctcctgtgcctgctgccgctggcccctgcctcatccccaccccagtcagccacacccagcccatgtccccgccgctgccgctgccagacacagtcgctgcccctaagcgtgctgtgcccaggggcaggcctcctgttcgtgccaccctcgctggaccgccgggcagccgagctgcggctggcagacaacttcatcgcctccgtgcgccgccgcgacctggccaacatgacaggcctgctgcatctgagcctgtcgcggaacaccatccgccacgtggctgccggcgccttcgccgacctgcgggccctgcgtgccctgcacctggatggcaaccggctgacctcactgggcgagggccagctgcgcggcctggtcaacttgcgccacctcatcctcagcaacaaccagctggcagcgctggcggccggcgccctggatgattgtgccgagacactggaggacctcgacctctcctacaacaacctcgagcagctgccctgggaggccctgggccgcctgggcaacgtcaacacgttgggcctcgaccacaacctgctggcttctgtgcccgccggcgctttttcccgcctgcacaagctggcccggctggacatgacctccaaccgcctgaccacaatcccacccgacccactcttctcccgcctgcccctgctcgccaggccccggggctcgcccgcctctgccctggtgctggcctttggcgggaaccccctgcactgcaactgcgagctggtgtggctgcgtcgcctggcgcgggaggacgacctcgaggcctgcgcgtccccacctgctctgggcggccgctacttctgggcggtgggcgaggaggagtttgtctgcgagccgcccgtggtgactcaccgctcaccacctctggctgtgcccgcaggtcggccggctgccctgcgctgccgggcagtgggggacccagagccccgtgtgcgttgggtgtcaccccagggccggctgctaggcaactcaagccgtgcccgcgccttccccaatgggacgctggagctgctggtcaccgagccgggtgatggtggcatcttcacctgcattgcggccaatgcagctggcgaggccacagctgctgtggagctgactgtgggtcccccaccacctcctcagctagccaacagcaccagctgtgaccccccgcgggacggggatcctgatgctctcaccccaccctccgctgcctctgcttctgccaaggtggccgacactgggccccctaccgaccgtggcgtccaggtgactgagcacggggccacagctgctcttgtccagtggccggatcagcggcctatcccgggcatccgcatgtaccagatccagtacaacagctcggctgatgacatcctcgtctacaggatgatcccggcggagagccgctcgttcctgctgacggacctggcgtcaggccggacctacgatctgtgcgtgctcgccgtgtatgaggacagcgccacggggctcacggccacgcggcctgtgggctgcgcccgcttctccaccgaacctgcgctgcggccatgcggggcgccgcacgctcccttcctgggcggcacgatgatcatcgcgctgggcggcgtcatcgtagcctcggtactggtcttcatcttcgtgctgctaatgcgctacaaggtgcacggcggccagccccccggcaaggccaagattcccgcgcctgttagcagcgtttgctcccagaccaacggcgccctgggccccacgcccacgcccgccccgcccgccccggagcccgcggcgctcagggcccacaccgtggtccagctggactgcgagccctgggggcccggccacgaacctgtgggaccctagccaggcgcccccccctctaagggtcctctggccccacggacagcaggacccggacaccctgtgggacctggcctcaaactcaccaaatcgctcatggtttttaaaactctgatggggagggtgtcggggacaccggggcaaaacaagaaagtcctatttttccaagcttgggcgaagacc

SEQ ID NO: 1023 - protein, 620 aa, Homo sapiens; identical to SEQ ID NO: 1021

SEQ ID NO: 1024 - DNA, 3053 bp, Homo sapiens
atggggcccagaagggtagggttaggggcggggacggtgctggggatgctgagggtcgccctggaaacctctgggaagattttccagaggcccaggaagccagccgggacgccgccgccccggaccccgcgccctaacctccacctcgggggcctgcacccccagattgaatcgggaattccggaaacccgagcctggaaccctgatctgggaccagcaccccgagatccggccgtggaaccccaagatctggagcctgaaccccagtatatggggctggaatctcaacatcggtcactgggacctcaatatttggagccggaaccccacaatttggaacacagaccccaatatttggagcagaaccccaagatttgacatctaaaacctcaagcctggagctgaactctgaattctgggcctgggaccttgaaatctgggactggatttccagtactgtaccctggaacccactcttggggacctgaaccctgggattcaggcctcaaattccaagatctggactgtgggattccaaggggcctgaacccgagtttgggcctgaagtccttgctgcagacctgagtgcttaaatctggggcttgagacctcccaatcttgactcagcaccccaatatctgaatgcagaaccccgggatcggatctcagactctaaaccccaccgtttggctgcttagcatcccaagactggacctgggagaccctgaccctgaacaacccaaactggacccgtaaaactggaccctagaggcccaatatttaggggtctggaaccccgagtattaaggtctggagactccgttgccacagatttgagccgagtcaggacacagtccctctacagaagccttggggacaggaaaagcatgaccagatgctccctccagagccctgacctctgactcccctggagctaggactctgctccctggggctgcttctagctcaggacacccctgcccgcgatggccatcctcccgttgctcctgtgcctgctgccgctggcccctgcctcatccccaccccagtcagccacacccagcccatgtccccgccgctgccgctgccagacacagtcgctgcccctaagcgtgctgtgcccaggggcaggcctcctgttcgtgccaccctcgctggaccgccgggcagccgagctgcggctggcagacaacttcatcgcctccgtgcgccgccgcgacctggccaacatgacaggcctgctgcatctgagcctgtcgcggaacaccatccgccacgtggctgccggcgccttcgccgacctgcgggccctgcgtgccctgcacctggatggcaaccggctgacctcactgggcgagggccagctgcgcggcctggtcaacttgcgccacctcatcctcagcaacaaccagctggcagcgctggcggccggcgccctggatgattgtgccgagacactggaggacctcgacctctcctacaacaacctcgagcagctgccctgggaggccctgggccgcctgggcaacgtcaacacgttgggcctcgaccacaacctgctggcttctgtgcccgccggcgctttttcccgcctgcacaagctggcccggctggacatgacctccaaccgcctgaccacaatcccacccgacccactcttctcccgcctgcccctgctcgccaggccccggggctcgcccgcctctgccctggtgctggcctttggcgggaaccccctgcactgcaactgcgagctggtgtggctgcgtcgcctggcgcgggaggacgacctcgaggcctgcgcgtccccacctgctctgggcggccgctacttctgggcggtgggcgaggaggagtttgtctgcgagccgcccgtggtgactcaccgctcaccacctctggctgtgcccgcaggtcggccggctgccctgcgctgccgggcagtgggggacccagagccccgtgtgcgttgggtgtcaccccagggccggctgctaggcaactcaagccgtgcccgcgccttccccaatgggacgctggagctgctggtcaccgagccgggtgatggtggcatcttcacctgcattgcggccaatgcagctggcgaggccacagctgctgtggagctgactgtgggtcccccaccacctcctcagctagccaacagcaccagctgtgaccccccgcgggacggggatcctgatgctctcaccccaccctccgctgcctctgcttctgccaaggtggccgacactgggccccctaccgaccgtggcgtccaggtgactgagcacggggccacagctgctcttgtccagtggccggatcagcggcctatcccgggcatccgcatgtaccagatccagtacaacagctcggctgatgacatcctcgtctacaggatgatcccggcggagagccgctcgttcctgctgacggacctggcgtcaggccggacctacgatctgtgcgtgctcgccgtgtatgaggacagcgccacggggctcacggccacgcggcctgtgggctgcgcccgcttctccaccgaacctgcgctgcggccatgcggggcgccgcacgctcccttcctgggcggcacgatgatcatcgcgctgggcggcgtcatcgtagcctcggtactggtcttcatcttcgtgctgctaatgcgctacaaggtgcacggcggccagccccccggcaaggccaagattcccgcgcctgttagcagcgtttgctcccagaccaacggcgccctgggccccacgcccacgcccgccccgcccgccccggagcccgcggcgctcagggcccacaccgtggtccagctggactgcgagccctgggggcccggccacgaacctgtgggaccctagccaggcgcccccccctctaagggtcctctggccccacggacagcaggacccggacaccctgtgggacctggcctcaaactcaccaaatcgctcatggtttttaaaactctgatggggagggtgtcggggacaccggggcaaaacaagaaagtcctatttttccaagcttgggcgaagacc

SEQ ID NO: 1025 - protein, 620 aa, Homo sapiens; identical to SEQ ID NO: 1021

SEQ ID NO: 1026 - DNA, 83719 bp, Mus musculus
  misc_feature (1)...(83719): n = A,T,C or G
ggcctttgtcatttattgaaatttcctgctctccctctttgggtcagctgcacctcggtcctcactctttccacgcagctttctagttataatgttgctatttataacttccctccgcaggcttctttgttaccccttttgcagtgtttgttttcctgttttctcagtactctgcccagcactgcttggttcccgaggcctcagtgatcccacaggcattgtcagtaggcgattgtttcttttgctcattaatgaaatgttcccagatgcttcagcagctgaactctgtggcttaccttctgtcctggactgtgcgatgctactcggttattttctccgagccttcaaactgtgctctcccaaaaggaggacgcactgaactgttccccaacttagaaacattattgggggaggagactcctacctacaccacagcatgtatgtggcagtcagaaaacacttggtaggaattgattctgtccctcctccatgtgacttccagggtgaggggggtgggggtcgaacaggccatcagaaggatagctgttttatctacccactgagccatctcaactggccctgactcagattttcttccacgacaaagtttccatcttacagaactgtatggcttgctaaagagaatgcctctgtgctgttagagtgggtttacaagcttgggaaggagcagctcttgagtgaggcatgagttgtgacctagcaaggttcctggaaggatgctatgatcacctctcagagtattgtctcagggcatttgaaaacctaagcatgcttactgcattcagtcgacttatttggtccgagctgactctgaggagcctgtagtcttttgggtcttgttggtctggttggtctgatgtcacagtcatttcctatcaggtaagccatgttgactgtgcatctttcagaagagaagcttctctgttagtgtgcaactttgcagtggctcttagagataccaacaagatccagcctggcggccaggcagggtggtccacatctttaatcataacactctgaaaatggaggcaggtggatccctaagttcaaggccagcctggtctgtggatcgagttccaaaacaaccaaggctatacagagaaaccctgtctcatgaaaaaaaaaaaaaatctagtcttttaaatttgtggcagaaaaatgtccatgagacttccattggctacaactcaatagaggacactgagttgatacatattatttctctagtatcacttgtatgcacgaggcggggctcttcggtgtgtatgttactttgttttgtcctctagatttagggatatacctcaagagagtagaaaagggtagtagggcttttggtttatttcttccttatggttgcatgcttaaaaagaaaactagcatgcaagcaactcccctgcagcatgcctttcagacagcagagaggctcagaagccgtccacaccacgatgggaagatgtgtggagaggctgctgtcatctgttggggactctgagtgtgacacccaacaacggcacagcagcctgatcctcttgcatgagttctttaatctctccgatgtctccagtttgtccatctctaagtgaaggatgcctaccctttgtgattatcaggaggattaaataatgcatataagtaacacacctaaagtgtcatcaggcatatgggaaataacactgaaagttaactccgtattaataagcagccttgtattttgcctttgtggtataaattggatttatataagagagactcagacagctattgtggaaaggctgacctgggagatctcagtgattagaggctcagaatgagcctgcagagtgtgggcatgtccttacttttgagatctgagtctgagcaagttaccctagccgtggcagaccacatctttcagtctcagcatattccacactgattcaaatgatcctgtgctgttagaatagggttgcaagcatgtgggagagagcagccttgccccgcatgtgccagaccttcatggagccctgaggagtgaatgctgccggaaggtcacctgggaaaccagatccaaatgagtgctgtctccgcattgaggggcaccgcctgcaaacagtgggcttcccttgggctgcttggaagactgtctaggggttttgcagatgtatttggaattaagatggggacctgcctgtgactctggccgtctgtgactggaccatgctgcctgcagagcagccctgcaactttcaaggtgtggaaagcaaagggcaaagccaaaggggagcaacaatatgtgacttatagccctttatatactccccaagaatcaagaaactgcccaagtgcgggtgcactgttcagggctcttcttaggaagcaagctaacccagagcagttgaaaatcctttgaaagtcaataaggagaaaatgacttacagcatcagctgctggaaaagttaggagctctcatgactagcgtgccaacaggtcaaaaaagcacgcggtcctgtcctctctctgtccagcttgctgtgctccaggagtgttctgctcagggtccgcttttctctgtggaagttctccatctgtaacagcctttctgttcaaacagaaactgaaatagctttggattctggcttaaaatgacgtctcctctggatctgcctaccgccccgccacaaaaggagattgctttcgtttggttcggattggtttggtatggtgtggtttggtttggtttttggcattaggcagagaatacttttaccaatgtgatttttcggcctgggcttttaagacactgtttgccacgtgaagttgcctttgctgtgtgacagactatgcagtggctacagtcttccaggcagacatgcttagacactgttttaaactctggatgcttgctcagtagtgaggcagtagagttctccttttgacgttgcaaagaccataagtatgttttaggtccttgtcttccttttggagaaagcattctcctttctcctcattcttactctgtctctgactctcccaccctcgatccctccccctggggggggggggcgggggggagaagcactatttagtttgactttgtgagttgagccacagattttgctaggatgtaacccagtgactgactgagtccaagaagcaacactcaccatctattccttatgaggtatacttatcttacctgatgctggttagtttataaagaaaatactttttcatagttctggagacagagaagtccaaggatgtagtgtcagtctctaaggagggcattcctattgcattatggcatggccaaggcatgacttgctgagcttgcctgcttgctctgtctgtctctgtctctgtctctctctatatataagataaaggcactactaccacaatgatgtcccaccctagtgacaccatacaatcctaattctctcccaaaggccttacctccaacatagattagatttggtttggttagatttagttagtcttaccaccacaccataatgacaatagtcaaattgcaacatgtaatttttgtttcagaggtacagtgaagtcatagtagtacctttatatgaggagattggagtggggaaaggtatgtgaagagagatagtggaggggtacattgaagactaataaactgaaagcattgtgatgcttgtaaggtggacacagcacagacccccagctgggctttttctccttgttcttgccattggtcccctgctcctcctcagtcaggcacagttcctgccaacagagatactcattctttgaaaactggaacttccatccaaactatgaggagtcctgagttccctggcctatctttgcctttcctgaaaggtagcaaggcatgggagcatcatgagcatcctccttgctggttaacctgaggacaaaacagaaggcatggccagccttggtgatactctgcccttgggctcctggtaccatggttgtgtctggaaagtcttacaagtacattatcaggaaaccggggaggtggctcagtggttattcacacgtgttgctcttacaggggacccaggttaggttcccagcgcaaacataatgtttcacaatcatctgtaactccagtttcccagaaatctgacatcctcttctaacctctgggtaccagacgtaaaagtggtacatacacacacacataaagtagaatgtataaatctttataaacaaatacatgtgacggccctgagtattacatgtcctcttgccttggaaagggccaaattgaggaggaggaggaggaggaggagcagcaggaggaggagcagcaggaggaggaggagcaggaggaggaggagcaggaggaggaggaggagcaggaagcaggaggaggagcaggagcaggagaaacaggaggaggaggaggaaagaaaaagaagaggaggggcaggacggaggaggcttctgcatgtttaagtactgggcaggatgctcccaagattagccacgagtctatttcaaggcttatccacacactcctccatagagtgcttggttgggttaatgaaatgagaaaggttcctttggaggtaggccactagagcctgaagacaggtcttgttggcttagtttcgaactggggaagcccatggaaatcctaggtgtggtgtttcaaataatatgaagattcttgccagagagacttacggactgatagcaaatggctttttaactctgttctagagtttggactacagttgaatacgatgttcggaaccttactccccatgggctctgacagtcacccagagcacctgttacctcccccttccctcactggcctctgtgttcccaccagtgttttccactgccttgtctaatgcttccatccttctcttctgcggtctcgttacttcttcttcccacgttggactcggaagctttagcttgctcgcttctcggagctttcgatcatgaaaggattcactgacagaagcaatcacgggctaaagggaaattagaaagaacttactaaatgcaaggaccaagctgatgtgcgaggcttgtttgtcctctcttaaagaaatgaagaggagttttaaaacgtgtggcctccgtatgcacgctgaccctggacctgtccttctgatggctgacacaggacatgttgtagcttttctgactgtttcaataaggttttgtttttattgtcttcgctgattaatggcaaggaatagaacggtctcatgggcaaaatcaatttgctttccttcgtgccctagttcacagcttccgtttcctctttttaaggttggactgccctttaaccatgcctgtgtgcccctcctctggagtggcgggggaggtccccttctttccccccatggtgctgtaattggaaatttggttactgcactaaattttaagttttggcactcatggagagcagccatccatctgctggcgagacgcactgcccggggcttttcaagaaatcccttaatagtcctgaacactaataatatttatatacatcgagatgagacaaaatttacagcaggcttctgaagctggctccaggactgtctaatcccagccctgcgttctcctgcttcctcctggaatcctctgtgctggagagagagccacacccctttcctccctgtagccacacacagatctctagagtcagtcccctagcaagcaggtcggccttcctccatcttctctctccctctctgcataccccttttttgtcctcttccacccacagaatatcagatgcgcatttgttcacagttggcatcactgagtgttaagggactcatggatctggtatatgccttaaaagaaccgttctatctgtaaagacagtgtttttaactttatggttcttagttgagaagaagttcccatcacaggcctggaacagggctcaacatgtctcaaatttagcaaatcctttgtcaaggatttctatttctctttctcatcctggaaagatgtagcatttgcatttggggggtaactgattcaagacagtgtacaaggttatttccccctgcttttatatggtatgggctttgactactatgtagctatttgacttcatcatctattgtgatgtatcattttctttcctatgtaagtaagtaaagggctccaaagttggcatctagtcctcattgataatctctgctgataacgtcgagctaacgaatcacagagcaatggtgttggcggatggctgggacagctgcaccagggagcctttagcgagttacattgaactttatgtatctgtgtgagccatagatggacagtgtaatcagtagcagattcctctcctctggctgttcttctgcccttctgcccactctggttatcatgccttcgctatacagcatgctgacctttctagtgtgagaacctaacccttgcctaaagcagggtgatttcctgctgtccgtcaatcggtgtgcctgtggtacctccctgagctggtccattttgtttccagcaacatctcagcctgtatttacatctgaggacctctgtgacgggtggtcctgatgcccctccccatcggccttcctttttcagtgccaatctcactgtctctgaagacccttccaggaacccacagtactaggaacaccctgtgcgtggtctttcctgcttccctggtgtggtatcctttccttgaggtcagggactgccaccgtacaattgtacaggatgtccagttgcctggcacacaggtgcagcgtttatccagtaaattctgggtgggtacgtaaatgccaacagatcgttgacttctgtcattgacagatttaaaaaaaaaaaaattaacacaaataacttcagtgctcatttagaccccaaaccttgatgtaacccgtgcagtgcatatgtttaattaagtcatcagactatcatcttcaactgtgtcatatattgatgtgtttgagtgaaaaaagaatcagtggtagtgtgtgaagctaaaaacatggtaggctgttaaatcagtgaactccattttactgtctttgaggtaattgctgtggtagacagtgtctgaattctgatattaggggctcctgcaggtttttgtttgtttggtttgatttttggtgtttttgttgttgttttatgttttttgtttgtttgtttgtttgttttttggtgtgaccagagataattaacttctgcttgttcctgagctagaatgggtgtccaaaaacagcctgaagctagttataataaatgaaggtcataaaccagctgagaaggctttccgtcttcacttgtgtgtggctctgaagataggtcttctgtgtggatggttcagttgcatagataaaagttggtttctcttcacctgaagaagttcaaaggtcagcagctgcagtgttagtctagagcagtggtttcagccttcttcatgctgtgactatttaatacagttccttatgttgtggtgaccccaaccataaaattattttgttgctacttcataattataactttggtactattatgaatcataatgtacgtatctgatacccatggtgtctgatatgtcacccctcaagaggatcacgacccacaggctgagaaccactggtctagagacaccagccatcttgagaggccaagttgaactcactatgttgcctcatgttccatctgagatggctgcgtgaatatctgtgcatcatttctatgtttcagccagcaagaaaaaaggagacacacactgtatttttaaaggagtgttccaggaagctctagtaaaacttttgctttatagcccatgggatgaacgaacttcaaacacagagcagccacgctctagccacagtggaggctaggaggccttggagccaaagagcatacccagcagaacacctaaaactcctacagggggagataaccagggaggggaaatgccccgatgtttctgtggagggatgactttagagtcaaatgcaagattatgtcgatttggcagtgtcacgagaactccggtctccttactgggtcatgctgctgatttaactgtttttaagggcagtgacacaggaattcttggatgtgacttagagctgtgtagacagactggtgtaaggctccagagcacatactgactccgtgcagtcagttctgaaaactgatcccagtggcgtgcagaggtgcccacaaagatggccgtactcatggaacagtaatgtgtgggcatggagggcgcgtttgatgctggggcacagctgtaacggtgagacgtagcgagattgctgtatggtggtatccactccaagtctatccagtgctttctccgtagtccaaggtttaacattcaggtatgtgtagtcatacacctgtgcacaggaagaacccgggaaagaccacgtcatgaagggttgacaaagcggctgttttgggtgcagatgaacttgtgtgttctttatgttaacctgtggttactggggcttatttggcttagttttggttttagagtagttttttttttttttaataaaacatggaatcttgactctttggtacatcacagttaaaatatacatatttatgtagttctgtagtatttccaaacaatcccttcccccaattgggtacatgtactgttagccagatttgtttgtttgtttgtttgtttgtttgttttatatgttgttcacaagtaaggatcataggcgtgtgttcatcatgacatatttacagaagtgcatagcagagtacctgttcagggtgtgattttagatctgtgattactggacctggcctttaacttaacaaggcttatagcaggtggcccctgggtacagaaaccctgtgtactaccatcctgtaccgtccagcagcttgcttgtgatctgaaggttgtgttgtgaagagacgttgcagatgcgggcattaccaaagaccttctataagcactgggcacttcgattgtagcttgttcctctttagagaccataattacttctgtgcccatggcaaagagtagtccctccgtagcctggatttctttttctggagtttgagaagagagaggccacagtcacgcagtgcttttgtaaagggtatggttaacatttgctgcagtaacctagaggttttgactagttccctgttttatttggaactttcctgttgctgtgataaaataccttgacagaaaaatggagccagagatagaggtttatcttggtgtacagtcctagaggggacagagtccttgtggtggccggggggaggggggaaggaatggctttagtcttgtcaggcaggaaacacaaagtgatcgcattccacccacacacaggaaatagagaagtgggccaggctgtaaaaccccaaacaaactctacccccagcaaaggacttcctccagctccctgctaaaggctctgtaaccttcccaaacagaccaccaccaccggcctggtgttcacatccatgaacctgtgtaggacatttctccttcaaaccaccgtacttgttatgcctcctctcttcatcactttgtatgcatgagggagaagggggtgtgcacaggccagtgttctgtgcgtggttcaggcatccactggggtcttagaatggaattctcatacagaaggagagctgaggagcacagtgccttgtatagtcctagaggcccatattgtctgtatttctctctgttcaccagtaccatgggctcccttttaatgggtgtggccactgcattttgaagagtccatgggtgttaaatgttaatggctcatcccatagcaaaccaggagtctaaaggagagaatggacttgggttgggttgtgtctttacccaagtggaattcacagacggtaagatctacgcagatttcagaggaggtgtgcttttctagccagtctccggtacgccacgctggtggtggcagcggatgacccaggggaggctgtgtagcccatcatccttaccaccctctctccctctgtcctcacagtgtgcccaagtgtgtgcgggaagcgagcctgcaccgagaacaacgagtgctgccacccggagtgcctgggcagctgccacacaccggacgacaacacaacctgcgtggcctgcagacactactactacaaaggcgtgtgtgtgcctgcctgcccgcctggcacctacaggttcgagggctggcgctgtgtggatcgcgatttctgcgccaacatccccaacgctgagagcagtgactcggatggcttcgttatccacgacgatgagtgcatgcaggagtgtccctcaggcttcatccgcaacagcacccagaggtcagcggctcttgtccctaggcccaggagggttctctgctgcatagcccctaagtgtaggacctcccaggggttcacccagatgggtctgtcagagggtgatggctgagcttgttttaatgcgaatcttggagtggtgggtctgtttcagcttgcttttttatttctaaactttgagggtgccttgctagcactagagcgtaagaattagcttgctggccaggtgctcccgagccttgctccccgtgcacctgcaaagctgaagcatgagcggtggagactttaactacagatactccttcccagcttgctactctaggccagtgaaagctttgcctctcagtctgagagagagtgaagacaaccctcaccagcattcatgaggcctggaaacaggtctcccatgtctcattgcaagcctgggctctgggcatgaactagtagtctgatctgccatgttttctgccagaacctcctttctctaagccttccaccatctttgtggcctctggttttccttcctggactctgaggcttcactgtggaagcagagctgtttctgactgaacaagctgtacttccacaaactcgtcatgggtgatgttcgtgaagacaggattttataactctggaaacacaggacagtcagaggtctgaggttgttgtttcctcccctgaacagagcagaggactttgggggaaggttccattgtaattcattccctgcctccggtactgtacacacatacacatttctgagcctctgaaaatacaactaggaagttctgaatactgcccacacttgtgagatgccctggatccagtccccaccttgtagaaggtcctagatccaatctctggcacatagaaggacctaggtccagtctccagcattgctaacaattctgtaagtatataaaatgtatagttttgctacagtcactctctataaaagatgttcagtacatcttcaaaaagaaattccattgctgctatagtatttggagatgtctctaactgtaagctgactgctggatcaaaccaaagattacattttctttcataatactaagatgaaaagtaaattcctacctgtttaatttctgcaccattatcacagtaaaaaggaaaagatcaaatatttttaaatgatttggtaagccagggactacaatgactcagaattgtataatacagtctactaaaaataagtctgccatttttttattcatgtgttggcagtctctgttagtcaactctcggttactgtaacaaaatacttagggtgatcagtttatgaagaagaggaagaggaggaggaggaggatgaagaagaggaggggggaggttggttttagctcttgggtccattgcttttggcatgtgccaaggacagacaggccttctagtaaaccctaccttgttgagctgttgactaagctgttactagataagcctttagaggccctttacatctaaataatcacttttagcatagaaaaggggtgtatgtacccctctacatcttgagccaaagacctttgtctggcagtgtgaagttgcttacccacagtccagacaatgccttccttctggggctgggagcagcaagggagagctggctggtaagagggagagctggtctcttgtgagactatgccaggggcctagcaaacacagaagtggatgctcagagtcagctgttggatggatcacagggcccccaatggaggagctagagaaaatacccaaggagcttaaggggtctgcaaccctataggtggaacaacattatgaactaaccagtaccccggagctcttgactctagctgcatatgtatcaaaagatggcctagtcggccatcactggaaagagaggcccattggacttgcaaactttatatgccccagtacaggggaacgccagggccaaaaagggggagtgggtgaataggggagtgggggggtgggtatgggggacttttgagatagcattggaaatgtaaatgaggaaaatacctaataaaaattaaaaaaaaaaaagagggagagctggccatcaaactcactatatcatatttgacctgcaagtttatttcctctccctactgaaaggcattcaactgtcctgtaacacacagtgaggatgctgtgtcttcataggagttgggtctccttccctccagtgtgctcttaaagcactgggctgctgctccctgcccgttctcacagtctctcccattttaaattaaaatactatcaagaaataatagctgtccctctgctggcctttgaagcctatttagcacttgcttgaaagtattttgaaaatactgtttgtgctctgtctatacaagagtgggttttaggaaacttaagctataatcagaacacacccttatagacatgttttcaattgctaaatgattcctagacattttaacaaagcgggaggtggctccaggttttcctatttggataaaaaaaaaatggggaaagaataaacatagtcatgttgaccctgaacgtttatttcatgtacttgtctgtagcctctttgtttgtaataccaggaagtgaggacaactcagatatctggtacaataagtaggaaagcaggcctccccacagaacatcaccaggagaggtaaaggaaggtttaacttcaagggtgttgtacattgggaagcacatcagcctcagaagccatgtgctatatgactgcctttctgtaacatttcccaaggtggcagtagaagacaccttggcagttaccgggagttagggatagtgaagtctggggcaggtcagagggcagctacaaacaggcaacacacaggaggactttgttgaagttgtcctcgaactcgattgcagtagggaatttacaggtctatgtagacagatggagaaatgcacagaacctgacacgcgtgccaggtcactgtgttatcgttatgttggatgtagcagcagttgggagcgttgggtggaaagtacacgggtgctctgtactgtctgcacgggtctgtgtatgaagctgcagttattccaagtatgtttttgtttgtttgtttgtttttagagagagctgggttttatgcgtcatgtagttaaatgagaaaaacacaaacagagcacaaagaaagttcagaaggaaacccctctccaggctagaaatgagagctgtcttagtttcttctctagtgctgtgataaaatgtcatgaccttagctgcgtatacagaagtatgtctaatttggcttgtgatttcaaagggcaggatcccagatggtggagtgaaggaaataactgagagctcagcaccagacgcctcctaatccttcccaagcagttctgttagctagggactgagccttcaaatgcatgagtctatggggccattctcgttccaacaccacaagcatgttgcatgtggtattataggaagccagatgtcccccactttggctagctaggtccacttcccatgggagcctgtgaaaacctcagccccactctcctaataggaaataggaagataacagagaactattaaggtttttaaacaaaacagactatagatagtattttgggaacggatggaagactttagtaaaggcagctcttgctttaccctgattttctttcttttcgtgaggtttcacggactcatttaagagcagtaatttgaatataacactgtcccacccattccagaagattgggtcatttttctcattcagaaatcgacccagcttctcggcccttattctgtatacaggctaaggtctcagaaggtatagccccaggcttagcatcttctctgccgtttcctaaatgatgggcaggaagcaggaagcatgccactgcttctggctccaggttgtgtgtggcactgagggtagcattcggacaaggacctcattagagagctgcggaggttcctggcttttattgtatgtgcagcaaaacaacatttggatcaatttacaagtttctgcaaagcactgtcaagatataaattcacttgtgctttagcaagaaaataatggacctgcactgcgccaggtacctgttggaatctctccctgggctttgggaattagactcctgttagtgacaaagatgcggctgtcccttccccagcgctgccagcttgcccaacctcctctggcatgcaggcaggcgagggtctcatcagtgagcagctccatttattcagagccccagagtgcctgtgagtctgtgtctcccaggtagaccagctggctccccagccacaagcctatgatacccacatgcttcttgcatgggaagtgtattctgtctaaaaacaagcgacatgctttcctcttctgcagtctgtgttccctctgtgtgtttgcagcttggatggcttgccctgggtaggagattatactgtgtgattgtttggatgtttcagcctggttctttcatgaaatgctgctgtaataacaaacaaaaagcctccttacttttctgttttgttttcttttttgtttgtttgttttaatgcaagaagataaactcacttttgtggttttggtccactctttatcttcaccagcatgtactgtatcccctgcgaaggcccctgccccaaagtctgcggcgatgaagagaagaaaacgaaaaccatcgattcggtgacttctgctcaaatgctccaaggatgcaccatcctgaagggcaatctgcttattaacatccggagaggcagtaagtactccaccccaccagaccagtggctggaccgcttcttggtttacttgcgtcgatgctcttcctggctctgtccctttagtcacaagcagaatacaggcttagaaaagcagcacgggatgtaagtaagcctcttgtgtgacgcctcccctgtgagtttctcggaaacataaaatccagatagaaagacagtcgatgtttgagccattagcccagaatatactcctgtaaagaggatcagccctcgtctttctttaagtcacatcttacgcaggaaaggcctgttctctctctctctctctctctctctctctctctctctctctctctctctctctctctcacactctctcacacacacacacactctcacactctctctcacacacacacacatacacacactcaccctctcacactctctctcacacacacacacacacacctctgatggctcagacccatggctggctcatgctagctgctgcagagtccacacttctgtaaggccagagtttgggttgcttgcctccgttgaggagactgagcaaaggaaagattaaagagtgatctcctgttttacctctcagagccagaaagatgtgccatccacacctcaagctgtggtctgagcctgcagactccctttcttcacttggtgtagacagcgctcctgggatgttgcttcagaattgtattcatgaacaacatctcccatggtggcagcagagccctgtaatcttatcttctctagtcttggactgacagagaaagtcccctagatagatgcccttcagttcctgccactagaacttctaggttgagctactagtagtttcatgaggtaaaatactataggcagaagactattattttaatctttactggtaaatctttagggaaagaaagtttttctttacttcagagacaaagtgtcctctttatttatagtggattgcttgcccctaagtatttgttaaataagtgaattatattcttagtctgtagaggtaatagaaacaaggtgggtttttttgttgtttttttttttttttttttggtttagggtttctttttgtatgtatggttttggatttttgtttgtttgtttttttctttatggggttttttgtggtagtgagtttttgaggcttgggcatttgtctgtttgtttgtttgtttctttaagattgattgattgattgattgattgatttattatatgtaagtgcactgtagctgtcttcagacaccccagaatagggcatcagatctcattatggatagttgtgagccaccatgtagttgctgtgatttgaactcaggacctttggaagagcagtcagtgctcttaactgctgagccatctctcgagcccccaagtccttagtttttattgcccattctctacccttccacaatggagggccctgttccccacacaagaacgctgacccttatgttaataaccaaattgtagttttgctcataccagatctattaattttctttgagtttattgatcccaagacatgccttttaaaattcataaaccttactgtttttatatcttcctgtcatgggagatcaatgtgattgggaaattcagcccatgaagaagaattacttactgggtgtggtgacagacaactttcatcctagtgcttctgaggcagaggcaggcagatctctgaatttgaggctagcctggtctccacagtgaagacacctttcatcctagtgcttctgaggcagaggcaggcagatctctgaacttgaggctagcctggtctacacagtgaagacacctttcatcctagtgcttctgaggcagaggcaggcagatctctgaactcgaggctagcctggtctacacagtgaagacacctttcatcctagtgcttctgaggcagaggcaggcagatctctgaactcgaggctagcctggtctacacagtgaagacacctttcatcctagtgcttctgaggcagaggcaggcagatctctgaattcgagactagcctggtctacagagtgagttcagggcggccagagcacttgtcttgcacacaggggttatagattcaattcttggggaacaaaacacaggcttagccgcagccactctttttttcaggttgaattccctgtagcccttacatacaactagcactgtatgtattttgcaagtgaggggactctgtgaggctcagacttagtataaggcttttgtcctcttctttatatcaaaccataggagaaactttcaccaaatcaaccttcaagaatcagatataataaaaatcccattcacctaatttattatagtcttagaattttgtcatgaaccaaagtttatgttacttgctatgtgaaaggtgggtaagcacgataaaagaaattcactggctctcggtcctgttacattagcaacttttcctggcaactttctggttacagaagtaattatgagcaggatagaaaacttagagatgcagaaattatttatagagagagagagagagagagagagagagagagagagagagagagagagagagagaccaactgaccctcaggcctctgaaaccaaaggaagctactttctccttaaacattaaaaatatatatatatttacttattgtagtgatttgaatatgcttggcccaggaagtggcactgttaggaggtatggccttattagggggtgggctttgagactctcctcctagctacctggaagacatactgctcttgactgcctttggatcaagatgtagaacccttagctctcctggaacatgcctgctcagatactgccatgcttcctgccatgatgataaatgggttgaaccttagaatcagtaaggcagccctaattaaatgttgtccttataagagttgccttggtcatagtgtctcttcacacttagttaggaaaccctaagactcgtgtgtgtgtgtgtgtgtgtgtgtgtgtgtgtgtgtgtgtgtgtgtgtgtgtgcaggtgcatctgagccatagtgtgcatgtgcaagtggaaatcaggtgacaactcttgggagtgtctcctggcaccttgtatgatctgggattaaactctggtcacctagagacatgtaggggacctgttccagcacctgcatgttccctgtttggtagcctagcctctctgagccccatggtcccaggttagttgactctgggggtcttcttgtggtgtccttgactcctcccgagttgctcagttgctatccccactcttccacaagactgttccagattcagtaggaaagaatgtgcctgcacctgctacgactagatgccccagggggcannnnnnnnnnnnnnnnnnnnagagagagagagagagagagagagagagagagagagagagagagagagagagaacaaaacaaaactgcctgcaggccaggaatagggatcagggagaggaagcaggaagatcaggagttcagcctcatcttaagtctagcatacatgaaaccctgtctcgatccagggtggggaaagatagatcaactacctgcatgcatcattgctgtgatattggagtgttttcctgcagccctaaatggagtctttaaatatggaactccaggtccagcaaagaccattcttaccaggctgggacaggtttgcccagtcctgccatggcactgtggagccaggactgcctgtcactgagcatatctaagagatgttgcctccatttgtcagctggggctaattagcagcctggcatttctgatttcacgttctgttaatcagcttggcaactgcagcagccagcctcctagaagtctgctttcccgcctcagaggccttgtcccggtgtggcttgcggagagtggagacagggacggttggtgctatgccagccttctcactgcaattcccccacgcaagacctgcttccccttcgcatccacaccagtgtgtgtgaatctgagtatagtgcgccacctgaccagaggaagactcggtgacatggactcctctttctctagataacattgcctcggagttggagaacttcatggggctcatcgaggtggtgaccggctacgtgaagatccgccattctcatgccttggtctccttgtccttcctgaagaaccttcgtctcatcttaggagaggagcagctggaagggtaaacactccattctcctttcacagaactgtggcgtgctgcgtcttaatagtgtttgtgtgtgtgtgtgtgtgtgtgtgtgtgtgtgtgtgtgtgtgtatgtgtgtcagaatacaacttgtgggagtcagtctctccttttgtcaagtggctcctgggggttcaactccactcgttgtaggcacctgacagcagctgcccttacccttaggggctgagccagctcccagccccgattagtgtacttttcaaatatccttgggtttgttacgcagaatgaaggtgaaaccctgggcctgctcctgctgcctaggtggtcacccaccttcctgctctaagtcctgtggagttgtcacaggatactaacaatttggcaaatgggtgtcttcattcttaaggtgcagtcatcaagggttgcatatcgtagtagttacactttttgttgccgtgatgagacaccatgaccaaaatgccttagggaaggaggagcttataatggggagcatccgtaacggtgggagaggcatggcaataagcaggcaagacaaaaggttagagctcacatctcaaactgcaaacatgagacaggaaatgaggtaaggccctgaacccccaaagcccactcctggtgcacttcctccagcaaggcagcacctcccagaggttccacagcctccccaagtagcaccaactcctggggccgttcgttcaaatgtgtgaccccatgggtgacatttctcatccaaaccaccacacgagtctaagctagggcgctgagttctagcagtccaaggtattcccagggaacctttcctgcaggagtgacagcagcctgcctgtggtgcttaactcccagggaaattgtgattcatctgacacttaacctgcctcagcctactgtgctctggggtgtgtgtgtgtgtgtgtgtgtgtgtgtgtgtgtgtgtgtgtgtgtgtgtgtgtgagagaatgcatttgtatgcatgtatatatttgtgcacaccctctggaggttcaaggagacacagggtgtcttttttctctatcttatcttttgagtatgtctctcaatgaacgtggagctcaccagtttgtagactaactggctgacaagcctcagagatgtccctgtgtccaccttctaagtgctgagatttcaggcacatgttacgtgggttctcttgtacagcaagcacttgagcacctgacacccaagccatctccttttcaaacagagaagcagaaagaattgcaaagtacggacagttcattttattacagagatatttcagcttgcagagcttgtacattgattagcttacagcgtctgtgtattgatcagctttcaggatttggagtattgataggggttgtgccttctgcacagaaatgctttgcaagctgggttttaaagcagccgtgggtttctcagcagagagtaaagctggtgcttactgcatgtgcacacagcttctttccagactctggcctgtgtgcccttgctggccccttcagacatttgctacggctctggtgtagctctgtgttaatgctttgaagttttatacgtgtattaactaagcaatcagggcccttagaaagacagtgacgggaagatccggagaaggcttgtccccaggctggtatgtctggatgaggtttctttacaacctccagtttttctcacaccaactctggcctgggtcttcccctggtacatacagccagaaacagagctgctcaccccgtccatcttcccattgcgagcagagaagcttcagaaaaacctccttctccttgcgaatccttctgcatgtgccaggtaccctgcccagagtgtcgcaatcattctggggcctcccgtacatgaggccgtggtcacccttaattcattgttgcttgtattaaattttaaagtgaactgtaactccatctcgtttcattatgtccccccagtagatctgtgccctatactccctgacatcgggaagcacgttttccttggcggattagtagctgtcagatctgttagttactggaggataagctcccccaccccttttttccacactgagcaagcgataggcatagaaagtcaaaaggaggctttgattatttcttatcaggattattacatggtatgattatcttatcattatgccttaactaaaagtatcatacacttagatgttgctgaaaattgaaggctggtttttatttccaagaatatttatagcctattttttcattattcaaaacttaggtatgaagtaccagccaagtcttttttttttttaaatgagtattttatttgtttacatttcaaatgttatcctttttcctggtttcccctctgcaaaccctctatcccatcccaccttaccctgcttctatgcgggtgctcccccacccacccagtcccacctcactgccctagcattcctctacactagggcatcaagcctttacaggaccaagggcctcccctcccattgatgccagataaggccccttcagctccttcagttcttcctctaacttctccattggggtccctgtgcttagtctgatatttggctgccagcctcttcatctgtattggtcaggatctggcagagcctctcaggagggagctgtatcaggctcctgtcagcaagcacttcttggcatcagcaataaatagtgtctgggtttggtgtctgcgtgtgagatggatccccaggtaggacagtctctggatggactttccttcagtctctgctccactctttgtccctgtatttcctttagacaggagcaattctgagttaaaactttgaagatgggtgggttgccccatccttcaacgggggtggggggcagtctaacctctggatatggtcttgacaggttctccttcccctttgtgggttatttcagctaatgtcatctccatggggtcctgggaggctcttgctttcctcgcatctgggactttgtggttgctacctccagttccccatcccctctgttcaatttcctgaccctctgtacatctcctctagctccttcaatacctgactctgcaccctcttttcccctccccctcctttcttcttcccaaatccctcccaccctctacttcccttgattatattgttctcccttctaagtaggatgaagcatccactctttggtcttcctcttgagcttcatgtggtccatgagttgtattgtgggtattccatgctttctgcctagtacccacttatcagtgagtccataccatatctgttcttttgtgacttgagttacctcactcaggatgatattttctagatccatccatttgcctgcaaatttcaagaagtcattgtttttaatagctgagtagtactccattgtgtaaatgtaccacattttctgtatccattcctctgttgagggacatctaggttgtttccagcttctggctactataaatatcagccaagtattgttaaggattctggtattggggaagcttccctggaaagctgacgccagccctgctgttagcatttgagaagggagtggagggcaggtgaggcctggagacttgtgttaaaaaacagtgtttctcagccttccagtactgccaccctttaatacagttcctcatgtagtggtgacccccaaccataatctattcattgctacgtcatatctgtaattttactactgttatgaattgtaatgtaaatgcatgatatgaaggatgtctgatatttgacctcaaaggaatctaaacccacaggttgagagcctcttgcttcaaggatatctctggccaggacatttgagactctttagtagtagctttctctggtaactgtgatgaaatccaaagctttgaggggccacccatagcaacaactcacctttgtctctcgttgtatagtattagggctcagctggttcacttcttcctcacttatttaataaaggagagaaagatttgtaataagcagatgaacacaggtagtgcaaagcacaggcttcagagagccccagaggagaggacagaaggtgctctgggtaccaaaaggaagactctggtggagaaggccacacaggcttctgagcaaagctggcctggaagggtttgggggactagaaagcacagggacagaagaggagagagcacagaatgacatttgggcctgtcttgtgttcagctcctgggggaggtaggcagtactaggattataggaggcactgttgcatgcagatgtagaggttatcatttaggtaagccttgggacgcactggagattttgaggaggggtgtattagcagagttatctgacatttaatttcagggtgctgtcgtttatactgatagcctcctccccctccccccagtgtttcccagaatgtgtggatacatcacagttacagggaaaggggagccctgtggaacttcaccaggttcacctcaccccaagtcagacagaaaacttggggtgggggagttgccagcataagctcgagtaactttctgagtatttctgtgtatgtttggcacatggcaaagattagaaatgacttcgctatccctgtgatccttcaaatgtatatagtcccaggccacttctgagtttttattttattttatattttattttatttttaagcaatcttgcctcaactcagtgttgaaggaatctatttcttgagctttttgtatggctactgaaaatggcataaatgcttccgtgcggctcaggaggattctgaagacttctgtcttgatggaaagaggaatatttccccccaccccaccccccacccccatgaaggtatccttcagccttagctatccaggaaagcactgcagttgatcttggccttctcggtagccccccgtgggaacacaagtgttttgcctggcgtgtagttcctgtgttttctttctgggcctgcttacctgggtcatgcatgctcatcaggccacatttctgtacactgatttccaggccgacgacaggtgaagcagaatcccagcagagcagacatcagggtgcacagccacagaacggtacttgggtagcagcaggaccctttggtctcagccatcactctctctgtagtgtggcatagctgtagaatcccaacttcagataagatcataggagttggagagatgactccctagctaagtgtacttgcttggcaatcatgaggcctcgtgtttgaatcctcggcgtgactgagcctagctgcacccaggagtagctccaggtggtgagctgagacagactgatcccaagaacttgctagtcagatgacctgcctgacctgagccatgaggagcttcagactccgtgagacagcctgtttcaggacagtggggtagagagtaacaggaggatgcccagtgtctctctcctgtgtccagaagcctgcacgtctgtgtactcaaggacagacacagaaaggaaagggttttctcagaagtagtggtgtggtgtagtgatagagcacttaacctagagtgtgtggtgcttgctacctgatctctagcaaagtgtgggggtcatgggggggattaagaaggaaaatcaagttttgtctggggatagggatatgtggttctccttgaataagagagaaaatatttccattatctgaaaaaaaaaatgctctgctttggacaactttggtttgggagcaatcaaataaatgaaaagttcaagctcttaggtgctgccaaagattattgtcttgaacagaacaaaaatactggaagggggccagtataaagttagaattcttagtctgtttaggcatctctaccctttgcagactcagggttttgtaatgtgccctgcatctctggaactagaccctaacataaccacattttagcacatacttgggacttttaaaatacatacaattagttactttgcctagcaagtctaggctgttcctagagatatggaagcatgtgtatgcaaatatcacatgtgaatgctcttagcaacattttccatagtattttctcaaaatggtgcgttagatataatctaggggttcctcagtataagcgcaaaacacacagtaagatactagccaatggtacatgtagcatcctgggtgaacagacaggggaaatgccttggatgggagaagaatgggggggggggcttcagtttgatataaatgttctgaatctggatgattgaaagatgattggccatctgtataaatttattgaagcccatggagctgtatatttatagtgggaacaattttagaaggtaaaacgtacctcagcaaagctgtttttaaaaagcactcaggaacaaacggcctattttgtcaatctatgtggtgcttggtttagttttgcctgggtatatatttccatactaactgagcctttgtagatggtataactgtggacctgaagtgaaccaatattctacagatgggctaagtagtgttataaatgactgtactggtgacagcttcagtgtactggcttctgatgccctctagagacagctgtcacaggcagtagtagtgtctccttgcaaaaatggatatgagttattggttgtctgtgcttccaggatgccagtaagagcttgaaagaggggtcctgtgtaggctggagaccttgagctcagccctgcctgtatcaaggtgcaggacttacctattttctgtgactttgttctgggggacttttgacagttcagagagtagcacaggtcatcctgtgcctttgtgaggtgattcaaagcttataacgtccttttatatttagcatccagttcttctcaattggcctcggggcccgaagagaccagaaaagatagctccatgggcagctgagaaccagcagccctagagaagctgagtaaaccattcaggtgccacttcataagcagtggagaaggtgcttgggcctggttatcagttcctacatggaagactctacactcggtcccctgcagtcttcacttaaaagggaggcctagaaatggtagccacagatcatagctaagtgttggctgtgagcttatcatgtgacagggcccccaaattgttgactaaccatcctagtaggtctatgcattggcaggtgaaacccatccaatagaggggatttttttttctaatgttgaaaaagctacaagctaccaggcagtggtggcacatttctttagtcccagcacttgggaggcagaggcaggtggatttctgagttctaggccagcctggtctacagagtaagttccaggacagccagggctacacagagaaaccctgtcttgagggggtggggggggtgcagaaaggaaggtaggaaagaaggaaggatcgaactaagagccaaaataccactcaataaaactccgggagatcatacagcgtgtaggagccaaaggaaaaaaaatgaacagtttggtttttaaaaatattctgtggatgtaaaaaggcagtgagcttagaaacgatttatgaagtcgcatttattgagtggttcccttaactagtcatctccctgagaaaacaatgaccattcaaggacattagtatcttgaaggtgtgtagacaaatctccacctggggatatctcttaactctcactattgcagaaggtgttgaggaggcaggcctcgggtgggggttgggaagcaggcactgtgtggacgggccctccccagcaggttgattattattttggtgaaggtttttatttttctttaccttctgtaggctccacaatgcctggattttattgatattggtattctggctcccagccttctctgcattgtttaaagagagaaagtttgtgtttactgtgaaaagataatcttgcttttcaaagtgattagtcaaataccctgagtttctatgtgcctgccattcatttgtcaaattcctggtttctaattcatgctccctccctggggagaagaatgtgtggctcagaaggaaggtattttcagtacaattctgtttcctgcttgagaaattagtttactaagaggccttggcctagatggagatgggagtttgacctgattagttggcccttgtatccggcctggaggtgtcttcaataacaggagatttttgtctcctgggactctcaagacttgggagcagccagaccggtgaggttagcgttgaggcagcagtttaagaatggcccatggttaggcaagacacctaatgggacccaatctttccaccattacacctatccttcagttgtctgcctatcctgaccacccccatatcaataagagtgaacattggtgggtcccgtaggtggcagttctgactgacaggtatccaaggacctccctaggacatacactcttaggtactacgatctggattcctttgatcagggtctttgtttcctactccaataaacaagcatggtaggggaacactccttaccaaaggctagcggctcattgagcccgtgcgtgtgcagaccctgcgctgaagcctgcgcagaagtgctcaaggagggttggggcttccattcaactgcttagctcacacttgagctccgactcctccatgtgaggactcttacctatgagagggatgtatgtgcagaggtcagaggacagccttacacagtaactgttcttccttctcggggtcctgatcaccagacttgtgatgtaagtactcttgcacgcatgagccatctcactggctctcataaggaatcttaaaaccaacgagacctcagacttcacctacgcacatgaacgctgctcttcatagcaccgaggaaactgcctgtggcttgtcctgtggggaattcatggctcttccggtcctgggtcctggcctctgagctccctaatgagttctccaggaagtgtcgggagaggcttggcaaccctgcagctgtaactcatttctcagtatgtgaaggtcatgttgaaagcagaccccctaggcagtagttctaatgtgggtgaggactctcagcaggtggtgcctaggtggacacagcctttagggcagaacaggactttgggacatgtttgtctggtctgtgggtggatttagaaataactgtttaaaaaaaaaaaaaaaacttatgcagacacccaagtagaatccttgctctccccttggccccctaagatagctatcttccctttggccatgcccatatctcccctctagtggaagttaggccttggaaacagtgccgtggccggcctggtagtttctgggtggacccaggactggtgtttatcagcattacctgctagacatcgagattcctggtgcactctggacctctgcaccagaagctctagcggtaggggatactgagaacaagctgtgtacatactaaatgtggaaagccaccatgttacacgctgcatctagctaccctgatgtgagagcccagggagacactggatgtctgtcctctcccacgtactcagggactgaaatgaaggcttcttgcagcgagaggcaaatgtacagagagccaggctgtctcccatcccatcatgcactgctgattgggcatgggtaggatttattcctagggataatggcagcctttgctgctagtatgtaagctgttccggttgagtagcggagcatgtctgttcgcctgtaggctgatttcaagcacattgtccatacctggctctgagagaaataaccaaaggcattttcccagggaatgaatcaaggaacatcctttggtgggagaagctttgtgtgttggtaatagaggtcatgaaattaattagtgtccagtcgatttcaaaacattgtccttggcacatctttttgccagtggctaccgccactgtctgctgttataaagccccagtaagcaagcaaaccccttgttggtatggaactacactggccgcagagaggctctctgtcgcctgagggggctgtgggctcagtgcgttgctaatgcgcatttctgtgcttccaggaactactccttctatgtcctagacaaccagaacttgcagcagctgtgggactggaaccaccggaacctgaccgtcaggtccggaaagatgtactttgctttcaatcccaagctgtgtgtctccgaaatttaccgcatggaggaagtgaccggaaccaagggacgccagagcaaaggggacataaacaccaggaacaacggagagcgagcttcctgtgagtgacagcatctcagacccctgggactgccacagtccagataacagtctttggcatccgtgggcgggctctttgtttcaccatggactgtcaaaccactgcagccagtgcctggcctctgcatattagtgggcgggtgcctgatacactcatactgatatatttttctaagggtccatttgagtctattaaacatccaagcaggttcttagagcttgcacagttaaataccttttcaatatgagcaaacaatatttaccgaagagccagtccactccaggtcagctctgcctttctctcctgtgccatagaaggatcagggtagatgctccactataatacttccgtggacgtccagtgtccttgtcctcacacttggcctcctttctctgccctgctccttctagaacaaagtgagcccatgtctttgaatcggaatgcttttcacatgttggacaaagtaataattccatcctggtgatgagagttttcaccctaagatctcatagcctagagttcaacctgttaacccagcccctctccaaatgtggtcccagacctggatgtcagtctctcctctagcactgtatggagctaggcatgatggtacactcctataatctcaccacttaacaggctgaggcaggaggattgtgagtttgaagccagcttgggctacatctaaaaccctgttttaaggaaacaaaaacaaacaaacagaaatactaaagctctatttgaccctccgtcattatatagcattagtggggaatcaggagctgtgtgaccaacagctagtcagacgtgtgcatacatgtggggggagggctagccttgtcttttgagtatccagatttatctgatactctacggatccaggaggcatcttgagaagagtagttaggcagaggtggtaagtgtgtacacagccagcaccctcacctttctgcagagccccctgacctgttccccatcaagaacatagcagaagcctgtgatcggagcatttcaaagggcttctcccttaggggcagccagcctgacctgacaggtcatgagtgcgccagccatagatttgcctttggaagcacagtcagggttttctctcagagtgacatcacagagacggatgggtttctgtcactcatggatgtgcctctgtgccccaggtgaaagtgatgttctccgtttcacctccaccacgacctggaagaaccgaatcatcataacgtggcaccggtaccggccgccggactaccgggatctcatcagcttcacagtttactacaaggaggcgtgagtttgggcctctcactctgatgtcaagcttgagggtggggacggccaggtggcagtgtgacttggctgaatagagagtctttggtgtacctataaagaatcaagtcaggcgaccgtcacctcatcctcatgtgacctctctagttgtcatattaaactgtcccaacctgagacagcagctagtcaggagagtgtcccgcctcagccctttcattgtttatatggtgtttgagtaagttcaccccaaggggaaaggggatgaattttaagagaactgaatgcctccaaactgtcataagccattatgtggacttggttaaatattgtcttagcctctgtcccccaaaataccccatggggtgctctgttctcaccaaggctaccctgaactgacccattgtcttccagtcacttgatgcatgcatggccttgccaagactttgctctgggccatgagccctctagcattaaagaatagtgagggacgaacctaggtgtcagcagttcctgataggaccatcctgcttactccacatcacagcttcctgagctgtcccattttcctactcagcctcctgtggccaggtggtttccccagtctgtgtggtcatccgttttcccaggcactgatctttccagaagcaaaggtgctggtggcagtgcctggtatcttcgctgccacttgacctagggtcctgggaactgttatagcccagggaaaatagaaagctcaaaatcactcagtgtttgtgtaaatgggggccacccctctcccatcgtgatcgaacacaagtcatgtcagcataatttcagaagccagtagctagcagcccttgcatctcgtcaaagtagacaccccgcctaccatgcatctgtgcagagccctcccttccctttgaaagtgctgccagtgcactggcgatgctaactggtggtatcaccaatgccactctctgagacaatcaggaaacaaagtgttggaatattatgagatagttaagcatcgaaaatagctattatctcagccaccaaacgcagacactattgcatacaccagcaagattttgctgacatgacccagatatagctgtctcttgtgaggctatgccagtgcctggcaaatacagaagtgaatgctcacattcatctattggatggaacacagggcccccaatggaggagctagagaaagtatccaaggagctgaaggggtctgcaaccctataggaggaacagcaatatgaactaaccaataccccctgagctcgtgtttctagctgcatatgtagcaaaggatggcctagtcggccatcgttgggaggagaggcccttggtcttgtgaagattatatgccccagtacaggggaatgccagggctaggaagtgggagtgggtgggttggggagcagggcggggggagggtataggagactttcaggatagcatttgaaatgtaaatgaagaaaatatctactaaaaaaattgtttaaaaaaaatagctattatgagccaggcagtggtggtgcacatctttgatcccagcacttgggaggcagttcgaggtcagcctggtctacagagtgagttccaggacagccagggcttcacagagaaaccttgtctcgaaaaaccaaaaaagtaaaaataaaaataaataaaaatggctattatcgaattacattttagagttctagggggataggaaagttagttttgtccaaaagttgtgttttattagtttattgtttgcattaaacagctctgcttgttttttgtttttttttttttcattagttgggtttttgttgatgttgttgttgttgtttttaactctcacttaagaagacaatgagcatccgcatgtcttagacgcagcattttcagtccctgtgaatgagggacttgctgtctctaaggctgcttgtcagttctgcggttcatagctgtcgagctcccgagtccagatgcttgattttatttttgtatagaaatctaattgatgatgagttttatttggagttcccaatagaaatagaaagtgtgacacgttcagcccctggggaaggttctggggagttttgatgccagagcccttcaacgttctctggcctgtgttgactgtctttcagaccatttaaaaacgttacggaatatgacgggcaggatgcctgtggctccaacagctggaacatggtggatgtagacctgcctccgaacaaggagggcgagcctggcattttactgcatgggctgaagccctggacccagtatgctgtctatgtcaaggctgtgaccctcaccatggtggaaaacgaccatatccgtggggccaaaagtgaaatcttgtacattcgcaccaatgcttcaggtatccacgcaccggaggaacaacctccaacccctgttccctgaatttttataagcttgctttatttacataggcacagtatggctggagggctagcaatgagatgcttgttgttgctgcttaacactgtattaacattctcactgccaacaccttaagttctcctgagccatttcctagacttggtaccatcttaaatgtcaacatctctgctctacgcaattgaatcggtgtcctccagagcagtaggatggtttctctgaatgcccaggatgtagccacttgtggctggtctcctctctctcagtgcagacttccagggactgagacgacaatgaccggtgcaccccttgcctctagtggcttgctggctttccacctttattccgtagccaccagctttctcaacaggcgaacgcaggcttagagtactatgatatcggattattgactaatcccttctcatcttcttcatgtgtttacgtactagttccccagctccagaacctagaagtggggaaaagcaaaggtgtgagtttgtatccaaagacgagagaggtagaaagatatgcttcactgtaaagataatgactgacctcttacaacaaaaaattccatcgacttgagtggcttacaacacaatgaaacatattcaccgttccaagagcaaagcaactgaatacatttctcatcttaaagtttgggagtaatgactcccagtgaatcattgcagcagatctgagaggaaaaaaaaaaaaactaagcaggaatttcttatcattatagcagattcttaagaaatcctattcttcttcctaaatattaaaaactgcatttggtccctgacctcaaaagtgcttgggaccgatagtgacgtacttagtccatcatgtgcctctgcttcatctgggaaacttgtcattgaaatacctagtaagaaactgttttggaaatacttattgaaaacgctcacgggaccaggcatcaagtgcttgtcttctctgcatcagtcttggtcttccaacgtgttgtccctcagtggttctcagagccttgagcaccgcatacatcctaacagccctctgtccattcgcttcctgttggtgtggtggtatatgacctggcaaggaaaggatttgacttccacatcaggatcacagtctgccgttaaggaagccagggtagaaactccagcagagacaggaactttggagaagcactggcttgctcccagtggcttgctcagcctgctttcttagagaccccaggaccaccagcccagaggcctcctcaccacaatgagctgggcatttcctccaccaaccattagttaagaagatgccctgcaggcctgccttacagcctgatcatactgagccatcctctcagttgaggtttttttctgtcagataggttgtgccaagttgtcataagactgaccggtacaagcttgttttcacctttcagattcaaaaacagcttggttggaccttattcttaagtgtcataaccacggttctgtctcttgcactttggaaactgccaaaaccagtgggcctcattctttgccatgtgcatgtgtgtgtgttggggatggggtgcgcttcggctgtggtatctcttttgctatggtgaggacacagcagtggtcctgggatgttttcctttttacgtaagttagttctacttttgagcctgggcatcagtagtatgtaagcctccgtcgttttgttaaactcatttgcttgtaacaggactttgcatagaatcagggctcaggcgtactggctttcctgaatcatgacttgcttacaagatctgtgagtccctgctccttgtttcacagtcctttcacccaggcacataaccaccccacacactgtccatcccccactcccactcttcattttggctccctgtcatgtttatcaagtttttatcagagattaaaacttgcaatcacaggtgaagtactaagccgtccaatttgccatttcctaatacacaccggagaatgacagttgtcataactgaatcaactctaggtttttttttagagtcccctttaaccccagctatgccctcgtagccccttcagtcccaggtcagtgagccatgtgtgtttgcacatagattatctaagagcaagtgctctgagagagggctggcctcccagttggtaatctttccaaagctctggttcacctcatgctctggttggtccgttgctatctctgtgcccaggtcaagcctgcagcttcctgttggtttgcatcgagcccctgataacctcaacctcggattccggtctattctctgaaatgttctttgttcttctttccagtcccttccattcccctagatgtcctctcagcatcaaactcttcctctcagctgattgtgaagtggaatcctccaactctgcccaatggtaacttgagttactacattgtgaggtggcagcggcagccccaggatggttacctgtaccggcacaactactgctccaaaggtgagctgggggctggcaggcagcaggcaggcagtgccactggccttgtctgttgtctgagagaacctgagccccagggtcacacctgtcacgttgcagggcttgcttctcagcagtgcacaccagcacccctcccctccaccagcaatgctaacaggcacttcctgcatggctttcattcccatctctggtcttccccaagcagacaaaatacccatcagaaagtacgccgatggtaccatcgacgtggaggaggtgacggaaaatcccaagacagaagtgtgtggtggtgataaagggccatgctgcgcttgccctaaaactgaagctgagaagcaggctgagaaggaggaggctgagtaccgtaaagtctttgagaatttccttcacaattccatctttgtgcccaggtgagtgtgccctttggaaaggctacatttgatgccttaggctgtgcatgctcccatctgccccacgcggagcagctcctgttggttggcaggctgctgggctgctattgcagtcagctgacaggaggcgctgctgttttggcttttacccatgttcccctctgtgtcatgtctgtttctttgaatttaaagacctgaagacaggaaacaaatcaaaaggtgctttaaaaactggatgcagtgacctctatcctcactaacttactgtctgtttgagtcttgggtctcagacctacattctccaacaccaaacctccgtcccttcattgggttatctatgtggagcattccacctgaaccaacactcagtaagagtagccatgagagtggccaggtatggagcgtcccaaagaggccaggcagaggtcctcccatacccacccctatactgggtgtcagtcaaatccaggactcctgtaggcatggccagaggtttaggtcgttctttcattgttgctaacaaattgcgtgatgcttagtggtgtgcatagctcaacagttttaaagttagaagaacaaggagccagtgtggcttttgttgatgaaggcatctttgggtgtgtcgcatggccaaagtacttatggcacagcagcgatttcagggcagacaggaagctgaacagacgttgagcacttagcttgtttgctacatcaggatctccccctaacaggaccattccctaaaggttcctcctgcagctgccccactagtgaccaaacatctaacaatacagcatgagaaccaagggtagaccgaccatagcagaaagcccttggtgtttagttatactcagatgacatcactttgtgactgctgttatcatcagctgtgtaacgctaggctaagtgattgggcggcaaggctgtggttgacccagatgggaccgtgcagggcttgtactgtgggtttgaaacgaattttctctcggtcacattccttcgtgtaagtgtcctcacctcagtgtcctaaaacagacccagcatgcagataggggtcaccacacctggccattagggtttggggggttgttttttacctcctaccgaggcaaggatctgacatctatacgaggtctcgcaaggtcccataaaggagcaccctagatgacaggagcaactctgtcatcatacaaccgagtttacctaaaacctattcctaccttcatgtcattctaggtgcacgtttatctgggggctgaaggcaaatatatcagatttagtctttctgcattgtctgactttgcctgtgagtttatagtagagtggaggctactatttataaagttacttcctaaacttggtatcagtaaatggctttcattggccgccatcttcatttttgaagacgcttcaaaaatgtttctgtcactaaaacattctcagatgttaaacagtacaagtttttccagtagcatcaggatactttatggagtaaggaaagctgatagtgtgctgtttgccaccccctggaccactctgtttgaatcatccctagccttctgatgcctatattgcctcccttcatggtcctgactctgtgtccacagtaactgttgaataatatgcaagagtgcagtgtttataagtaaggaggccactgagtctgcttggtgctatagcccagtttgttgggggtgggtcaaggcaagaagtggaccagtatcattttgcaataaatcaaacacaagcaacttcttacatgaaggcacacgtttgtgttgctctggtttgaaagggaggcaggaaatttaataataatgttttgaacatctgcctagccgccacacacacacacacacacacacacacacacacacacacgcacacacacatgcatgcacgcacacacatacctgaaaaagtagtttcctttatctttccttccatggtttgttgattggtcggtttatggtttgctgggtgtgagcatggtagaatagtaccctcatttcctatctctttccccagcattatgataacaaatccccattcctaacttttgagatgggccctggtatggcagttgatatactttcaatggaaactggcatgtcagtacccgacaaagaactatggttttggtagcagatccatctgctgaagaccagggagcatgcggccctttcccccaactccctactgtactctcccagatgttggcctagggagcatccataggccttgggcatggcttccaaggcgcctcgagcaccgtactctaggctcccttttgtcttactctgtcatgttcttaccagacgcagtgcagtcccacctgttcctctcatcctttgtcctgtcacaagcaatgccagcaacagcctcaatacccagcttgcccactgttcacctgcagacaacctgagggttgcttccagcccatagggctgcttatctgatgtcatatttttatttattttttttttcagtttttatgaatgttagaagttttttctggaagagagggagccccagactctgttcctgttgcttttctgtagtttcttaagctaacacaagtcagtgagtaacagaggctccgctcctatcacagacaagctcactgccaaggaggatgcaaagccaggtttgatgaacctccaagaccatgctgtgtactagggactgggggcattcatcaataggagaccctgttcctcaggaaaagcgctgggatttaggtacttgctagctgcttaaactagggcatcttcatttcagagaagatcaaagaagccactactgttggactttgggtctcttctaccttgtgtgtcttaggcctcacctttcccaaccagtcttatgaggctgatggtttgtcgtgttgaatgctcagttatcaggcctgaccaagtagcactgtctggtaaaacagagcactgtctggctaaaaatggctggcacactgtttcctagaaccatgtgtgcacatgtttctctgaggatgtctcaagagagtacaggatgggttgtgaaggcgaaaatcctggttatttgttggttcttatccaaggagcctaagtagtttcttttagttcaaggctaggactttcctattacttctaccctagccatggaaaagacaaagaaaactaaagaacttagcagctgaccttctttctcctccttgcaggcccgaaaggaggcggagagacgtcatgcaagtggccaacacgaccatgtccagccgaagcaggaacaccacggtagctgacacctacaatatcacagacccggaggagttcgagacagagtaccctttctttgagagcagagtggataacaaggagaggactgtcatctccaacctccggcctttcactctgtaccgcatcgatatccacagctgcaaccacgaggctgagaagctgggctgcagcgcctccaacttcgtctttgcgagaaccatgccagcaggtacggcaggtagccccgccgccaacttacagccaaggcgggggaggctgacagcccttagattcaggcctacgaatgtgtggttgttggtacacaacgtcgtccgtcaggtgcctaaggaacagagaatgtattcctagtgccagctcccatccagacttaaccatagacactctttacaagcccctttcagggctctcactccttggcttggttcacgatgcacatgctcacacccacccctgtgcccttctgtgcacagctgaatgagttagctttctgttgctattacaaaatacccaaggcagttgtcttaccagaaggaaaggtttattttggtctcagtgtttcaggagttttagaccacaggcacttgcctctcactgctttggggcttgcaatgaagcaacacatcgtatttcatcacttctttcattgaagcccaatctcctaaagtcctgtcttctctcagtgccagaggctacagactgagagcacaaaggccttagcacaccacagacctgtgaggggccctccaggtctcaaagcttgatgcagaggaagcgttgtcctcgtggtcagctagatcagcctgtgggcctcctcctacagttagatactgcctgtcaccctgccagccatttgccacttctcattcgtggaggaggtgtcagtcagtggggagaacaaagcatgctgggaactggggcagtaagagcttctgagatcggctttggcactcccgtgtagccctcagccacccgtgcctcagtttcccaatcctagaagagacagagaacagcttatctccccaggcctctctcggctgtcatcagctgtcacccaacagctgtggttcaccaccagaagtgaggccagcggtggctggaagagacagtggccggaacagctgcctcagaggccagcctcggaactggcccttcctccctcccgtgtgagggtgtgggctgtgaatgtgtcagtgccacagctggaggctcagcacgctgtcgctcactgcccttccccagggccgctctgtttgaagggttcttttttttttttttttaactttttaggtaggaaaatggacctggagaatgttacataggtttttcaggcgtgatcacttgtacttggccacaggttttttcagtcagaggggatggaggcgctgtgccagcagccatctcaggaaagaactcctacaaggtcccctgtccagagtcctgtatatacaaggattgggggaacagttgttctcaagttagcacaccgtttatcattctttctggggacctaaacccaatttgactgcttgtttacattaattatgcagaaggagcagatgatatccctggtccggtgacctgggagccaagacccgaaaactccatctttttaaagtggccagaacccgagaaccccaacggattgatcctaatgtatgaaattaaatacgggtcgcaagtcgaggtaagagggataccatggcctgcagctgcatgtgtttcagcgctgagagcacgtgctatggcatactggttgtctgctgactgctaagcagacaggggagaaagatgggcagtcgggaaggataaaggtcttcctagcaacgccatctttattgagtagtaacttgggtgcatggagctggctggacttcatacaaacaatgaaactgtagctaggcctccagccgcagactagacacgtcttgatgatcttttattcctctggagttaccaacatatttgatttaattaccaacatatttgattaccattttccatgtgccaacctgaaaaccacttttccggtatccttgcttcctttatgttgatactctggacaatgtaaggagaggttgggcagctggagtcacagcatgatgacttgagttgacagatgtcagatctcacccatgcttgtaggaaattaacgccttatatttccataggatcagcgggaatgtgtgtccagacaggagtacaggaagtacggaggggccaaactcaaccgtctaaacccagggaactatacagcccggattcaggctacctccctctctgggaatgggtcatggacagatcctgtgttcttctatgtccccgccaaaagtaagtcttattgagggagacgcacggtaaatttcaaagctggctgggccagaactcagaagccctgagcttctggggctctctggttttctgttagaacagagctggctgggttgaggaggtggcttactagggaaagtgcctgcttaaagatctaagttcaagtccttgacggaaaccaggggcggtagtgtgcttcctcggtgctcaggagatcgacagtcaaagttttgcagatccctagctagccagaatggtccattggtgacctttgctttcagcgagaagccgtatctagaaaacggaggtgtcacgccagaaaggaagacacttggtatttactcacagtggacacacatctgtgccaccatcaccttccccccaccccaacactcgcacgcacgtgcactcgcacgcacatcccagagctgggaaggtgctgagccttggagccttctcttgtgagtaacagaagagtatcgtacaacctagaagatatcttgttctcatcgtggctcaggtgtggaggcattttgcaaagcattgagttgagtatcaggtctcctgcctggtcggtgagggtgacccagcgctcagcgtctccccagggatcgtctggtgtcactgctccgggacaggaatctgcaggacaacatcccagtcagagtcttcccctcctctgtgctcttcaccatccaccaggatgcattgaaagatactctgtgcgttattttgcacagacccaccctagtggataatgtttcacagttcacagaaaccactgagtgagctgttaggattcagatttaaaagtaaatgttgtgaaatgttaaatgcaagggctgcatgcttgtttgaccgaaaaaaaaaaaaaattgagtctttttggtgaaataatacatagtgaatttttacgtgtcttatgagaagccaaatttttttagattatttcgtgttcatgtaatatccaaacaaatacaggatcaaatgtgaattccttttgcactccccaccccccaaaatctcagctcagctttgaggctagaatctagggtgtggggaactgttgtttcctaatgtcttatgttcttcgtggtctcttctggattcttgattcagacaaggtctcaacagatccagcaatcccagtccaaaagaaatggaagttagttgtgttgaaatctacaccccccttgtttttttggcccactagtcacagtagccaaacaatgaagtatcctccagcaggtgcctgggtaaaaatgtggtccatatatgtaatggaatactgttaatagaaggtgcagaaagggaaacaccacgtgatctcacgtatatatgaaataaatctaaaagggtgaactcagagtcttgcaggttaccaggggaacataacttagggggtgttgctcaaaaggtacacaattttaggtagatagaagagtgagctttataacacactagctatggttaataaagcattattgaatattgctaagaaagtgttaccaccacagaaatggtaacaatgcgacttaatgctgatgctgattgggttaatgtacacatgctttaagatatgttgtatgtggtaaatatgtatacatgtataactttatgtcagttcacacttcgatagcccacctagccagttccagatattcaaagatacgcaagacattcgaaaatcctcatcgtgactgcacaaagacagaagtaaatagaaccgtaagcaggaagctaggattccctgtatctgctgctactgtgtctagattgagagatgatgagactgagagttctgtcaggtagactctgaattttctcatttttttctgggtagcctagcgtcatcagttagcttatgtgctaactctccattgtgatgttactgtagctctccgatgtggcaaaacccagagatgattagaggggtggcccccacagtttcgggggttgtcgtgctctgtctgttgattctattacttttgggctgttctgagacaaaatgtcagaagcaggaagcacatgatggaaccaagctggttacctccaaaaggcagaaagggcccgggtttcacagttctctcacaggacacctgcttccagtgacctgacttcctctagaacccagctcctaaggttacctgccactacttcccaataacgtcacaggccggcaacgaagccctgagcatctctgccttggggtacatttccgcttatctgtagcacgtcgtgctactaagccaacactggagttctggaaattgggtggtgttctctgaaggagcagtcttgacttctgaagctaagtgagtctggcttttcttaggagagggcatgtttgtagctgcctttgtaaagctaagactgcaatgccactggggactcttaagaggtcctctaatggggtttctccagtggaagttggcacatcccacagggggattgaagctgcgtgctagcgctcttggcttctgggaaattttcccggtgtccgacaagacgcagtttagcacagttttcttgggtctaatcctcagagggggacattgaaagctcggcatcacctgctgtttttaaggaaatcttggtgcgtgaattctattaaactcctcttcagacttcttccctcccgattaaatattctcaggtctttgggccctttcttgaaagccagttgcatagacaattttctgtcagttttgtccttctggatgtgttccagttcctctgtgtccctgttgaaatgtgaaactcaaaaagaacacagaacaacctgacccgtagaatcaggaacacaaaaccacgaattctcctaggggaaaaggaaagctcggagcttctctctggcagggaggcgcacgtgggagtacttttagaaactggaaggtgctgaatcccatcgattttgaaaaagacttaattttggcttttgtagtatttcaggattaagaatagagtttagaggtagaccaaccattggtgagtggctcgcggtccaggaacatgtctccactgagtccccagctcctttccaaggagacatctctatactgttggtgtgtacttggtgtgcacatgtgcagaggtcagaggacaacattgaagagttgattctcaggttccagggattgaattctggttgccagggtaacatagcaagtgtttttacccacaacgccatccttattgtgtagacatgtcaacttgggtgtccaatagttgctatagactccttataagcctgaaatctaaagtgctttcatggaggcacttcggtccgtttcattccctgatctgcattccgttgggctctcagatgaaagctcacagcccttcgcttcttcttctccgcatactcatttttgtttgtttgttttcccatattaactggagtcttactgattctttctggtacatgacgggaatccagcctcccagttactgggttgcggctgttctgagccagggctgcaggaaagccaggctctgactttggaacttgtcagttatccgtgcaaccctggcaaagttaggacgcctctctgatcttgcttatggaaaaggatttcttcctgaggtctgactggagcgatgcatagcatgccacaggagactggtacgttcccttaactcctctagacctggcagtgtgcagaggcccccagtgtgtcctcagacacactcatcttcccagtacatgaatccgttttcagtctggccttggaagagttcactgatgcttcttcttcattgttttagttttagccttttagaacttctgacatgagtactgtatttacaccatctggctcctccctctcccagcttcttccatgcccacctctctcagttccatgactactttaattattgttgctaagcaacttgtgcgcacattgatacatatatgtctatatacatatatgcatatacacctacatacatatacacacatgctctgccaagctcatttagtgttactggtacatgtatgtgtttagggatgaccacgtgggattggctaacctatcagcaagcttatgcctgataaagactgatcctccttctctctcagcagccattaactgctggtaacttctcatctaggggtggggcttcagagattccccacacttcaaagcatgtgaactggtattgtcattacgcaagtttaggtaaccgcgttgttgggattcacgcatgcgggtggtgtcttacataaaaggtggcatccctcagcagacaccctgggcttctggatcttagaatcgtaccacgcacttattttgcagtgttccatgagcatttgttgtgggggttgtggtgtgggtctatcatcagttgggcatgggtaccccatggtcagtggttccctgcattttgaccagtcatggttttctctaatcctttccatctgctgcagaaagaggcttctctggcgaggcctgagagctagttatctgtgggtagaagctcactgcttcagaaaagtgctagtagcaggttcttctctagtgtccacgacactacagagagtcagctaggtttacagaatcgggcaagaatttcctcccagtgctcaggccttcagtgcacttagacagctgttggttgtccccagatcaaggtgccagtgttacatactgaggaacatctcaatatcctggtcactgctgcagttcataggcttaactgctgaccactgactcctctcaatctgaagaatggggcggaaaccacttagctggaaccaaaccccttcatcattcaatacactctgcaagacattcctctgcacgggaagccgtttccctaggggaagcaaccctcgctcccccatctcttcttccccctatgcccagcgtacatccatgttaatccacctgtccacagactgagttcttgaatctggcagaattctcaggattttcagaggtgtagacctgaacccctggaggccatcctgtggtacttaccacccaggtactggtagcaagttcagacttgaattggttttacatatttgtagaacactcagagcaacattggcagggagtgtcatccagtgctttggggggacgggagtggcgagcaagctgtctgtgggactttcttaaaagataagaatagcgtgagcaactagtaagtgtgtgagtgtctgctcattttccttcagctaaacttccacaaaactacacacaggaagggcttgccttcagaattacttgctgtattcagaatatgcagtgctttaaaggagtgtgtgcttcagtctgtatttatttacctttctccaaacaattcagtttgtctgctggtcttgtcccagcactagaagactcctcgaagactcctcttgtgagatgagggagtaaaggctattccagaggcggttttatcatccttccaaccatacacagaaatgaagtgagccagttattcacctcgtgcgtgacgtcttcctgtttcttccttgtctctgcagcgacgtatgagaacttcatgcatctgatcattgctctgccggttgccatcctgctgatcgttggggggctggttatcatgctgtatgtcttccatagaaagaggtgagtgcctgggccagcggaagacagtacttgtggcgcattggcttgatgatttgaacttgaacatagctcgtctgtgggggaaaataccatgcagactggacagccagagttcctagtcagacattcttcagaggggaaaaaaggacatttcctaatgactaacagcaacaggagaggggttgcttccttctctgtacccgtcgtctgctttctggctgttctagcacacagattgctgccttgtaagagcttctccaagcatgccagtttagcttcccatggagtgggccttgttatttccagtgaagcaaagaaacaaatgtttctttagaagctctaatctgaggccagggcaaaagtggaaagatttgtcctcagataccggggcctggatcaggagtgcaggcaagggtcccgtcagcagtgatcatggtttgcgtcccttgctcaagataactcgtgagaaagaaaaaaaggaaaagaaaaggtatttacagaaatgtatagagatgggatttgttgacctggttttcatctttttttttttgacagaaataacagcaggttgggcaatggagtgctgtatgcttctgtgaaccccgagtatttcagcgcagctgatggtaagcgtcctggccaaggtgtgggaatatgggagctgtcaggtgctgactggagaaaagcgttgcgtaattttgagatacctttgtcccaggatctgcctttggtaccatttccttcttgtcttttaataacatctttagcactcagtgactgtcagacattctgggactctcagatgccccagtagaaaccaggctctggagatgccggtggccggtctgctaagcagttcagttagccgcttgaagtgtggcatcagagtgaaaggagcattctaattactaccgtctagtcagaggactgctgtagccagccaggcatcctgagtgggtatcaactcagggtggggctgcaggcgttccctggccagtgagggctatatagcgttgtatgatcttggaatccctctgctgttctatcctgattagggtcatacagcctatgcacccatttacattccctttggcagtaactaatgaaagtcatttaattaaatggctcagaagttctgactcggaacctgtgttttagctactggtctctttttttcccctagcgcttatgcttggcttcagaccttctaagtaagctggggaggggtcctctcctcgattagcccttggagctttctcatgtctatctagatgcaggcaaaaaaagaatctctgagaaggacttgttcaggctcccacagctgagccgtgggaagtctgcacaagggacatcccaagccttcctcctgaatcctcatgatgtggtgtatggaagagctagctgtgaggttgctgggctatgtagggaatctggttagatgggggtctgtgcagcgcaggagtttgttcaggaggaatgtttctttgctccagaagtgtaagtagatgcggcccagataagacacagtccgattgattatcctgctcacatgggaaaaaaaaaaaaaagagaaaaccctttgtaatttaaaagcaccatgtaagtgcgtatggttttactatggtttctttaatcatttataactggattatgtgtatagtaaagccagtcaagaacagcctcttctgaatttgaatcaggtgcagaataatgatgttatttctgtttgcaaaaggtcttgcagagttattttttaagtaggcatatgtgcatacgtttgtgcctataaagcatagaaaatacactagaagggtaagcaccacacttgaaagcatagttacatagttacttacggagactatctttctcctaaaaacaaacaaacaaatgaagtgagtttggatatgtagtttagtgatagagcatttgcctacggtgttccagaacgggttctgtcctcacaccaccaaaacaaacaagaaagcaaacgggcaaaaatcaagaaactaaatatgcattgtttatacaggccagcctcaaactcctggcctcagatgatctgaacaccttgcctccgtcccctaactagccagaaccgtgcagccattgtgtctaggtcaataattataaaagagaaaagaggtgccagagaaatagtctccctccccccttcaaaacaaagcaagaacaaacttgtcactacccaggtcaacaggtgagaacactgtcacctcatctgcacttggtttgtttggccttttgacaagcacagcagcagcacaagccttttgcctcaaagagctacaaagtgacattgcatctgaaaggtgctttaaaaacgtctttctcccagagttaatctgcatgttgctgttgtcaagagtgcactgagaatgccctacaggaaagtgctgataacattgtacgaagtttatgaacagctctggctggcaaagctgaggtactctggctaaagtcggcagctggattgagtttagaaaaagggttgagaccactaacttcagggacctcccagggaatggatgtgatgggcttttaactccatgctctgcagcaagcaagccgtgtagttgattctcattaaaagccagcctggatccttagaggtaataaatggagacagtggtccccatccttacagagaggtgttataaagacctttccccctctgctctcctcagcaagctcagcctctgcagggtcacaagttgtctgaggcccatggaagacagaattctagttgagaaattaccagacatacatattccatgaaatacaaaaacatgcacaggagccaaatgtggccacacaaacctggaatccacgtactggggacactgaggcagaaaagttgtcaattcagggctagcttggattacatagcaagttcaaggcaagtatgaacaagatagagcagtcctgtccccaaatcagccagtaagtaagagtaagtgagtagacagataagtatgtgtcttagtgttctgctgctgtgaagagacaccgttgaccacagcagctcttctcatggaaagtggctggcttaaaggagcttacaggttcaggggtttaggcccatgttgtaatggtagcaaacatgatggtatgtaggcagacatggtgctatggtgctggagaggggttaagagttctacatctggatcaggcagcaaaaatagagcaagacataggcctggtatttgaaacctcaaagcccaccctcggtgccacacttcctccaacaaggccacacctcctaatctctgtcaggtatcactgctccctaatgaccaagcattcaaatgtgtgagtctgtgggggccactcctattcaaaccaccacaagatgtatgttccattcttcaaaatacaagtcaatggggtccccagccccgaatttataataaacacccttcccttaagacatcacttagaagtaagggcttgtgctctgagggtgactgataaccgtgatgacctgctggtggggtctcccacctccaactgcagctcggcatctaaaagcataaaaacaaacacagccgtgattcccctcccaggcctgtctctaagctagggcttccttcttgccatgcctgctggccatcctctgttagacagggctgtcagtaactctgttaggttatggttctcatggagcaggtattctctttccagatcttacgtattaatttgatatgatttcagttctcgctgtacccactggcgttatgggatggagcctgtgtttggtctttcttacttgcctctcttattttctttccttctcttcccccttccttctgagaactattcgtttatttatttttctcaaaccagatcaagcataaccaaaaatggaagctggagaaggaattctgttcaggtccgtgtcagggaggttcctggcattgcagagtgcaggccaaagccgtggggtcactactgagtccccctccatcccagcgctcacttccctcactagagatcccctggaagggggctcctaggcttcacctgtgttaggcaagagtttggcttcttgtgttaagttttaatactttcatgcattccggggctagagagatggctcagcagttaaacacactggctgcttttctagaaggaccctgatttgattcccagaacccacgtgccagtggcacccaggtgctatgtgcgtacagtgcagatgcatgcagggaaaacagccattcacaaaattgatggttttaaaacagtatgcattccactaagtcaaatcacttgaaaaacaacacagcacagccctgggattaaactgcattttacagcctgtagagcaccttgaatcatctgggatttgaaccctgggtttcatctcccaaccctgcttttttcttcatcaacgtgtgagttctccttcctctcaggtggaaaaggcaggcagtctgtatcgtcactagatctcggtgaaaggggcagcagggtgtgttaaactggatccaacctctgcagcttccagagttaaacagctgtatggaggaatatagggagacagtgcttgtagtgcacaagacctacctcagcgctctgcgggggtgggggtgggggctggcctctcatctccttttctgcggtttcttttgatggctgaggactcttctcttgagtctctgcctttagtgttgactgagtttctccctctcagccaccttgagcttgttgtcggacatggctatggaagaagtggaatgaagtgcgtgaactgatagacatcccaggcggctgacacattgtcttggtgttttgaaacacaatctgaagatgcctttagttcagcagaccccatctccaacctccatgcccagtgggctggggtgggactgcagcttcctgttgccacacccagctagtagccatgtttttttaagtgtaaaagctgatgagataaatctgttagaattttcatttagcccacaacatccaacagttaatataaaagctatctttttaaacttgttttaaccaagtctttggaatacaaagctggaaaaaaaaaatggcccagcagttgagagccttgctggccttctggagaactctaattcagttcccagcacctctgtgaagagacctcccgccatctgtaactataggtccgagaagccaacactgtcttctgggtttcccaggcacccaaacacgggtggtgcctcacatctgtgcatgtgtgtgtgctcatacacacacagagagagagagagagagagagagagagagagagattttcacatgtatacgtaaattttaaaatcttttaaaagttatctttttttacttgttttaagcaagtctttaaaatgcagtatatgtcttacttccagcacgacttcaagcgctgaaggcctacagtggggctgggtggcctgtaaactggcacccaggccatgcagaggatgtttctcacctctggcttcatccagggaggaggagatttgaccccctttggtcctttcccctcccactgttctccccttctgacctacatttccatcccttgatgaagacaggcaaaacagaagtcccactttctttgtctcttagggctaatttgctttttttattttgttgggttggggttttgccaaggatatgaaaaaggaaccactgttgtttggtttgatttggttttcctatcttaggtttcttggtttccttctggttcttagctacgagtaccaccctcaaagtgtcatggagtcctcagagattgagtacccgtgctggactgtttgtaccttgatgttctccttggtaggtcttagggaacagcatcttgtaatctctgtctaagggccgtttccatcctgtctgttactagtgtacgtgcctgatgaatgggaggtagctcgagagaagatcaccatgaaccgggagctcggacaagggtcctttgggatggtctatgaaggagtggccaagggtgtggtcaaggatgaacccgaaaccagagtggccatcaagacggtaaacgaggctgcaagtatgcgtgaaagaatcgagtttctcaacgaggcctcggtgatgaaggagttcaattgtcaccatgtggtaagaagccaagatgagacatggacagaaagtatggacagaaaggaccaccctgtatgtccttggccagctacggaattgttgccttgccctcttcccagtgggtagtttccccgttgcattcttgccacccacagacccttgaggtgggagcctcgccctcgccctcccaccagaactctgctcctggctacaggccccagcaccacccagttccgagaggcgtaggtcatcatgtgggatgcccccctccccctctgagtccttttcttgattcctccaggtccggttgctgggtgtggtatcccaaggccagcccaccctggtcatcatggaactaatgacacgcggtgatctcaaaagttatctccggtctctgaggccagaagtggaggtcagttttgttcctcgctgtgttatcttgcttggtccacttttttcaggagctggcttgtaggaaacgtgtctttaagtccatttgcttctcagccttgagtgccttgagatatgctttcttgtcagttccctctatataggattgtccaagtgtaggcagactgggatctttggaaggtctgtctctgcatcccacccattcaacctccagcatctctgtgctcttgtttctgcatccccgctacccctgcctacatcttacaccaaccccagctgctctaccacgtgtcatggccaacccttcccacagcttcccactcaggccgggctggcctcccccactgactttccagtacacttgactgcctagcatacgtttactctcgaggtcctcggggtgagcctcttctttacctcagggtcatgaccgtggctggtaaccttttcagtaagtactcaataaaggtcactcttcaggttgtcagaggttttggccagagtgactcgcagcccggtctgtgcacgagaccactgtttcctcaggagcccattacacacacacacacacacacacactcacacacactctcacactcgcatacacactcacaaacacactcacacacacacacacacacacacacacacacgtgtacatgtgagcatgctatccttaccttgatggcacacactgctctccccttgccccgacactgcttcagacacttctcaaaccctgaacctactccccaggctaggcaataagccagtattgtgcctgcgcttttaaatgataaccattccagctgcatgattctgcttaaggctagtgagattttcaaactgtgaacctgagtaggtcctgtgtaattttttgattagtcactgtggagtgtccccttctgttgtgttagcccacagccagctttttagcatatgtgagtctgacttcttttttgttgttgttatttttgtgtttgtttgtttgttgttttttgagacagcattttgttttgtttttttttctgtgcagccccggctgtcctggaactcgcttcgtagaccaggctggcctcgaactctcagagattcgcttgcctctgtctcccaagtgctggcattaaaggtatgcaccacaagcacctggcttaagtttggcttctaagtcctcactaagagttaactgatgggggtgttgagaaatattgctggaccaaatgcctttcatggggctgcctcaggctctgaggctctcacttcggccctggctttgatacctgtggctaactaagcagcttgtctctgcattcgctgtaaggggaacttcctcttctcgggccctttctgggtttgctccccttctctgtagaagctttcgttttcttttcctccacaacgtaatcatctaccaagtgatggatggttccttcattttagttctgagtacctgttcacaaatgtcctcatgtgtgtttctgaagtttcaggagagagccacaaggcggtgtatgcattgatagcagagccacaaagctatgcctgtttctcccagcagcagcatcctaccccagtaatacccagtctacagaaggagactggagagtggtcctttaaggcacctcctaacatcagaatgtgcttaatgcctttgacacatgcccagagtaaacccgtaacttgtgctctcggggctgtttttgccattggttacctccagtcctcagttaacagatgcctctgggcctccgcttcctcatgtagagagagaaagggctatagagatggctcagcagttaagagcactggctgctcttccaaagaaccctgggtggattcccagcacccacgtggcggctcataactgtcggtattcactgttctgctggcctccatgggcctccgtgggcaggtagtgcacaaacacacatgcaggcaaaacacccacaaacataaaacaaaattttaattcaatgtaaagagacaggttggattacgaaagtctctttcggaagtaaaacttaatctttaaattcatcagatctaaattttgtctaactcatgtcagaattttttaaaaaataacttacatatatcttagcatcaatgtatactccacagttcagtgtatataccctagctccagtatatatacccagcttcagtgtatacaccccggcttcagcgtattctacctccccccattgctgtttgcttatttacttagataagtgtatggatgtgtgctcaccttaagaggctctaacaaaactaaagatttcttctttctcgagatgaagaaaagaatgacaacatattaccatgaactgacaaaatgtcagcccagccctttcctgcacataattaagtccccattgttggttgtttttcacatgttaagtgacagctctttgttgaacagttacacaacattacacacatacactgcagtatgtgtcatgagcctataagtacatgtcacggaactgcagaggtcctgctttgccatgtgtatgtaagaccctaacggtgctaaaggtcagcgtgacaaggaagcacctgtgatggcacatcctctgaggacatcccctagattataggaagagaccctggatcagagtgaaaatggttaaatagataaatgagctcaacttggtcctcacatgccatgtcgtctggagagtactcctggacgtgctagagggctgttgctggcctcctagagtctggcatctgctgagaacttagcaaccctggccaagagccagaatgctcttgagtgttcatcgtggtcagagcacaaagggcctatatactagcccaaatagtgtgatctccaagcctggtcatgctctcctgtgacttgagatacattaggaaatgagatggcttcatagtgttgtatgagaaggttttcagttagggaaactgaggcataagggtcatggttggttttgcacatgggagtggggtgacggagctttgggaattttttatgtttgtatgtgtgtagtgtgtgtgtgtgtgtgtgtgtgtgtgtgtgttcatgcatatgcatgtgcatacctacttagaccttgagggagttggttttcatcttttaccatacctgtcttgggacatgaacataggccccctgtcttgacagcaggtacctttcccactaagccattctcatcagcctcttagacataaatcttatcttattttgtttgtttgtttgtttgtttatgattttaccacttcttaggttaattcttttcagttcctaaggcagcatcttgccctcctcttcagacatgatattggtcctcattgctgctcagtgtccttggtcccctccaaggtgaactccacctgaactgtggttatcctcagtgcccgtagaaaacagtaatccaagaggaaagcattagtcttcctatctttgtaccttagaagaagggaatgaagacgaataagtcctggcagcttgcacgggaagcaaagctcgtggtaatccacttaggaagtgtgtctgtttcacgtggcctttgtacgggttctctgtccttcctcttactcacacttggtgatggcggaagccaaaggaacatggaaactagctggagctgagaatgcttaatgcctaaacttgctgattcacttcaaatcatttttgtcctgctccaaatagaaaagactaggggggagggggtggtcacaggcataaggaccagagttcaggtcgtcagaagccaggtaaaggctgggctggtgtggcagcacacctgtgattccagccttggaaggatgagttgggatccccagagcaatctatgttgaccaggttgggtttgatagggacaccctgcctcaaccagtgggtagaaggtagctcccaacataagcttcaggcccccacatccatgcacatgcatgcatgggagggggtgggaaaagagattgctggtccctagaagtgctagtccttcttagcaagtcctgactccctgcaggtgacctgtggtactcagactaagtaaatatgcatttacgactcctagtgtagacctacaggaggttaggggggaaaggtctccgttgctcatggctttgtcttgttttgaatctgcagcagaataatctagtcctcattcctccgagcttaagcaagatgatccagatggctggagagattgcagatggcatggcctacctcaatgccaacaagttcgtccacagagaccttgctgctaggaactgcatggtagccgaagatttcacagtcaaaattggaggtgtgtcctttgctttccagattggagcacaggctaaactgaactcacaggtgctgaggggactttgcagtcattagtctgccactggagagattttcattatgtccgagaggagcagtgcctcgcccttgagtgcaaagatgtatgtagtcggtgtgactgtctattcctggctgtaacccggagagcaccttaacatggtagtccagattggcgccctgctccccaggtcaaacgttacagaaataatcggggcagcttgcttcctgaagtggttttggcttgaggagaatgtcaccatccagtccacccctcaagtttctcagcttacaaagagcattgtccctgaataggcccatggggttcctaagaggccaggtgcccctatggtgaaaccctgcatagtgtaacaggaagggtatatggtggtcatgtcagtccgcgggagatcactgctgactgcttttcactcataggactggtcggctctaagttctctcctcctctcctgctgccaggaattgaaccgagggcctgatgtatgctgctggttaagccactgaggtgcatccttcagtggtagctccaagcacttggccgttctgtcgtgcatagcttcctgccatgaccttagctgctcagcctaccttgttgctgccaacacattgtgatcctaaaacactgattgcattacatctctggtcattggctagaaattctccccagccttacagcttgtatattggctttgtttttttgtcttttacttcaaaaaaaaaaaaaaaaaaaagtagtaacaaggttgctcagaaaaccatcctgcatatactttaccttcctactgcgataggccagcaggtcagaaacataacaagtgtccatcctgagaacaagcagagggacagacgatgtagcagaagcgatcagccactaacctttggccgcctcttgagcttgtgtcctggagatgttctgcttgcctcaaccctagaagtggtttttgcatgagccattccggcctcttagtaagcgatgggtgtcatctctagagaggtatccaaagtcgggctctcttctttgctgattgcaggagttaggggtgttggcatgcagctgtgttacagaacagatgtcagtcattggagttactgaagatacccccagcctgtctctgggtttgtacactcatatttggagccctgggagcctagcttggtgggcagcccttaagaggataccccgccccagagtttctagataagaggcgcatcctcttaaccagcctttgtggtccttcctgcctcccatccctcccttatgtgtggggatctagattttagtcctcagaggaaactgtgctcctgagtggcctgaggcaggtgccttccctccctgtgccatctttccccacctgtggagtgagagtggattgggacagagctggaggaggaggcgggctgggacagcaagcctgtgcccctgtcctcatcttaccctgctgtgcacccttctcagcacagccaggaactccgagaggctgctttggtcccattttgcattacagttggaaaaatgcttttgtgtgtgcgtgtgctttttgccattttaaatccaaatcagtaaggattatattttctgcttaaccatgtggcgcatttatgaggatattttctattataattatgatttttctttttagaattaaattgtgtgtgcccgtttgggaagagggggttgttctatttttcttttgcatttagggagagagattgttttctagaattccccttttatgcaagtcaaagcagatcctctcatttgcatgtctctggattaattcagagatgagatttaagcacttcctttttcctcctcgggcgagttctgcattcctcagtgtcccccagtgcccccatctcagggattacacaccctaaatcagttcaagagaggcagccagtagctcagacagcggtgcaagtcaattgtgttgggttaacatccatgcagagcaaaccctacatgggtttgctctgccttttttgtacctcacctctttgtggcaccacttagaggtgcgaggggacattttaaaggttgagcagctcttccctccagggaaggagaatgcaagagtttatgtgagggaaaggtggtgcggttgagtggaaaatcaaaaatggataaagacacagtaatgtgagattataaaaaagcaagcctgccattcaccatgatgaaactcagaaaatggaaaacattttcaaaactgagtgagagtattgtgttgggaaagggtgttgggtagtagctccaggagcctggtgaagaacatctcagctgtttgctgtccttttatcttcctgagttcttactgcgtacattgtcctctgtggagtggcaaaaggccttttcctcagcagtagagacacactaccaagtaaatggggtcttcatcctcccgtgtattggaccaaactttaaaactatatcctcaccctgtgcggcgtatattttcttgaaaaatcatggtactcaatgattttgcaaactgcctctcgctttaaatgttataagggagttaatttcttaaaggagcctgatgaagaccagagatgtcttgtattctcctgtgaagtggctgtgatgctagagccctctcagagtggagcaagaacatgtctcaccttgaatatggggggaaggacagggctctgccccaagacctggtccagccgagtaactgtgcatcttccctccagatttcggtatgacacgagacatctacgagacggactactaccggaaaggcgggaaggggttgctgcctgtgcgctggatgtctcccgagtccctcaaggatggtgtcttcactactcattctgatgtctggtatgagagtttccctccatggccagcttggaccttctcactcgtggctcattctcctccttgttttgttcactgtgaccaactgccagccttgagttcagctctcagtgccgtttagccctttgtcttttagatattcctgtgtggagtccattaaagcaaaaaaggtatctgtgggaagccaaggagtaggtagaaccaacatttccttccatttttagcaaatattgattatatttccaaagactggggaaatgccttcgcctctgcctgttcccccgtctctcttccccactctcagtgagttggtactgggtatgtatgtgctcctgccgcagctcacgaaaccttcagattgaaggcagtgctttatttaaacccaaaacttgagtcttggtggttgtggttttctgttggtctcatctgttcacacacacacacacacacacacacacacacacacacacacacacacacacacgatgtccattattcctgacccaaagcatcttccttaataataagtgtcttgcggtagtagcacactgaccagagggtgcaaagacttctctgtagtaatgtttactgcagttccttggaaacaccgtgtggaggtcatcgggttccaaaatacaactggagttcttggcaggcaggagccctggcacgtcgtccccctcctcgaatgtcagcaagtgtcttggctgtctcctcgggagatcccgttgctgttgtgtcacagaagaagtggtggttggtttattcaaagggcggatgaccacacagagaaactatctcagtagtgactgacatcagttctttagcctcgtgaacctttcccggtcaagagccttggatcttgtttggaagacaggtgcaaattggaaatagcctttgaatatgacccagcgcggcctggttgtttcccgactctaggatgaggtctgctctgcaattagcctctccgaggttacatcttctctgtcgaatcaaagaactctgttccatgtgtagatgaggtcgcaggagagggcacacctagggccacacttccatctgtttgttctaagcttcatttttctggaagcttggagatcaccttacaggatagggaaagagtgagcacagactcattctcccccgactctgggtaacaactgcatgccacagccagaggcgcacagggtgcttcctgcaggtttcctccacttggattacgtagccattacaaaccaataagaaaatgcgtgaagagaaaaggccaagtgctggggtgtttgagcacacagctggggacatcaaggacactagaacgtataaacggatgctcagctctgcctgaacctctgcttgctagaggaattgcagtcattttagaatgaattcacagtcagaagtaggtaaaaatccaaagaaaagttggaaggattttgtttgacttggtaggagaccttaggaacatggtgaggggaggtgtcctcaggtcaagccacaccctgaccatctgcatttatcacagctgttatttgagcttctggggagatgtcccagggactgtcccctccctcacaagggcaggaaggccagcccttacacgtcttcgttctttctgatttatactctctatcttcctgtccgtcctatgagcagactggctgctgagatggggtgggatggaatgggaagttggcctgcagggagtccaggaggagaacagggtgccagcaagagttacactggagctgacatgctgagtctgtagagtcaagtaaccagcaatctagacatggcagtcaagagctgggggccaggattgtgactgaatgcctgaaagcctgtggtgcaccagggaaagcatgaaagacaaggggagtcggcttggaagggaacctggtcaagaccggttgataaaaagagaaaaccacatacatcactgcttgtctcaggccggattcagacatgagggtgagcactgcagcctctaaagaatgcctccgagtgtccacaaaggctctgcaaggcagaacccaggcctgaaacacacaggaaacctgcttctctagggccaggtctttgaaaaccgtaactgcactgtctgtcttagtgactgccggttcccaaggaacttgggtctgattgctgaggttctgttcctgtctgacattgcttagcatcagttgggacaaaacccttttgttcctagaaggaaactgaagctgcgaaccaaaagttaagatgcagtcagaggctgttgctccagcttaggccaggatcctcagagtgctaagtggaaaatggccgcctcaggctcttctgtggggctcagccctgctagggttccatccgaagccttgtgttggcttgccatgggcagccttcttcattctagccatacagcctgaccataagagcagacaggccaggaagaattttgtgaaagcaagggttctccctgagaaggtgtgttcacactgagcgacagtgtgaccattgtctgtctgaagtgtctgcatgcatggatctcctttagttccatcttctgggctgacaggccatacctcacgcagtagaatcctcgctgcttcgcctgatgagttcatacctcagccagcctctagaccaagggactctttgttattgcgacacaccccctggccagtgtatcctaccccagttcccttcctgacacagccacctctgcagccatggctcctgagttctgcaggggacgagttttcatcttccttgacccaagtcaagatcctacagaactttgagacattccaggcccagctccctaccctacaaccagcaggtcagaattgctttggagagcccaagatacccattgttttaagaaccctgatcagattcttcttgcggaggtgtggagaaccattagcatcagtatttctaagctggcatgaaaggaatccctgaaggagatagttgagatgcttagctgtctcaggtcagtggccaggctgggacctggtcctctgcattccttgctgaactagagctaatttggcttatgtccaagtaatggctgggaccaggcactgaatgtgtccgctgtagatcgggctcttaaaactgtgagagatgttagaagcccctgaacattaggtacctcagccctgccacatgggttgcagtagccctacaggaagccttagcagtgacaaaggggaacagatgtcccacacgtagcaagctggctggtttgacatccacaaagtgcagtcgtcacattgaggacacttttttcaggacccagagtcttaagaaatgctggcaaggaggggacctggcccttcccatccctttctgagctgtccctgttctgttccacctgtaggtccttcggggtcgtcctctgggagatcgccacgctggctgagcagccctaccagggcttgtccaacgagcaagttcttcgtttcgtcatggagggcggccttctggacaagccggacaactgccccgatatgctgtatgtatttccagagccacccactctgttgcgtgtgggtacaggagaggattagaagggggcttatctatcctgctgctgctgagcttgttggatctgtgactttgtgctgctccttaatctcatcctgtgccccttggtccccccagtgctaattggcactttgcaccatggcgtgcgtctcagccaccactaccccccccccatctcccatctctgaaatacatgagcaatcctggctcatctttttcatgcaaaatttaatttttaagacaaaaatgcaagttagttactactgctgagccagatttgaaagctctccccaagcccctggaaggtctatacagcatgctcacacagagctctgtggtcaggagtcactctcttgcacgggtagactaaagctcagagagccccagcacaaggtcacagaccatctgctgtcttcttaatcccttcgagctgcatggacctacagcacggttgagctcatccctctttggacatgcttgtaggcacaccctagggggggttggtgagatggttgcctcgctccacttctgttaaaaataacatcctgcatcgattggttgtgagaattgtcactcgatggcagtacacacgtggtgtcacgtccacctccgtgctcagccagtgtgactcgagaaactccctgagataaacagcttacaaggagaagcatttcacattggctcccagtgtgggagcggcagtggggtccattggatttgtggcgaggtaactgttacggtagaaaaggtgtgtcagagcgcacagtctcactttgtggcttgaaagtgaaagggagccattagagaagccgttctctacctgtgagtcgtgaccccttgccccttcacaggagttacctgagaccgttagaaagcacagatgtttccattttgcctcataacagtagcagattacaattataaagtagtgttatagttgggggtcacaacgacatgaggaactgtgtcaaggggacacagcattaggaaggttgagaacccctgcattaaaggggttcacaatcttcctgctgtagtcctaaatcttgaagataactttctaatgacctggcagcctcctaggctccacccctcagaagttacctggtgttgccaaaattggggaagaatctttccacatgtgggccttttatttgtactctcttgagtagaggtctttctttgtcatctgatgttggtggctcagtgggtctggagaatgacacttcttttttttttttttaaaagatttatttattttatgtatatgagtacactgtagctgtactgatggttgtgagccttaatgtggttgctgggaacaaaggttgcccactccggtcggccccactcactctggcctaaagatttattcattattaaatctaagtacactgtagctgtcttcagacagcaccagaagagggcgtcagatctcattaaggatggttgtgagccaccatgtggttgccgggatttgaactcaggaccttcagaagagcagtcagtgctcttacccgctgagccatctctccagccccgagaatggcacttcttggagtgaggtttcaaggaagacatgaaggtattccgattggctcatcgagtacaggttgagagcagtggacttgcatttgatgtgcacacgttaaggtggggctcggctgttgctctgcatctcggggttaagcatcaaagcaggttcccactgatatgtcaggacccatacagtttcccagaaacacttcaaaacaggttcagctccactagtgaaagaatcccaggggggttgtcaagatttcttcacttctacacaaaagactctgcctacccctggccttctcttccccagcgcagcgctcactctcgtggcgccttggatggtgaggcaatgtacagatggagaggttgggcgtgcagtgcaggtggtgggcagagcacagagaggtgctagtgactgtactctgaatcttgagatgtcaaggtgtgggctagcatcgtcccccgtgaggctccaacagttgaaaatgtcatctcacaggctttctaatgaaacctaggaggagctcgatgaggtgacactagctagctcagggtctccagaagatagctgctggtcagaggcagggcttcccgcagatgaagatactccggtacgtggggtgattgtaaggagatcggatttactacagggcggtaggaacagtgatggttctgtgtagtgggagaggccgtggcttctctgtggaccactccatagactgagaggatttctctaatacactggagaggattggtggtgctggggaccgcacgctcactcttccttccagcccctctgctctgccactatgattcaggaatcaacaaggatggagtcagtgtagcccaggtatttaggataatcttcctgcctcaaactcccctagtgcttggattgcagccagtgttactgctggtgcccaactaaaactttatattggaatttgaattcctctcgttttcttcttataaaatactcctatttgggggtggggcgtgggggacttgttaatttgtttgtttttgccccagctgttggcaagtgtaaaaaaaaaaaaccctcttgcttgggagggccttacaaaactgaatagacagcaggccatattgagccactgactggtccgtggcctgctgtgccctgcagcatcttcacggagaacactgccactgtggcctttctaaactgacctccgaaggcgtacaggatgcagggggcctgcctagagaagctctgggttctgagtgctgttatagctttactttgacctcagtggtgcagggcagtcctactcgtccattgcgagaatagtcagtatgtgggcaaaggtgaaaggatggagtaggagcatggctgcctctgagtctgtgtaagggtgtgccccaccagccttggttaggataccaggatcagcactgtctcacgagctgagaaaccgttcaaaagagcaggtgtgagttttgttcctgtggtttgggcctggtcacaggagaggtattgttggtttttttcttttcttttatgctggagcaaacatttgtctgagaaactcatggaactcctgaagttgatccatccccagctgcctggatttttttttttttttttggtatgaatttaatatgcttgggaaggagccacctgctatgggaaaggcagtggacttcctgttcccagcatagagaggaggaagcttacacacggaggccgctcttggatgcgaaatgattgattcaggaggcctttttgctttgccattcagaacccccttggcagatcggtctcctttctaagaaaagaacagagtgaagggaagggagccgggctgctccagtagggagtgtggtgccctgatttggctgagacgctgatgagaggaagatgtgttctgtgaaaggatttttttttttttttttggcacagtaagcaaacactcttgggagtagtctgaagcctgttgggtctcacacgtagaggaaggacttccatggtgtggttctgaggcaggaacagccctttctctggccatgctttggtctcgtcgtccctacacatgaaccagtctgcttcaggagtagctaagtatccagccttgtgtattacaaagtgttctagctttagaggaaaggctgccaccaaacaccagggtatccaggtctgactgtcagtgcaatagctcagtttgaattgatctagcaaattctgtgaggctgggtcaggggagcctatcattcccatctttacccctgggtttcagggctttggacacagatttgtcagtgaaccctgctgaggtcaggggccagtcccagagttcacggaacctggagatcctgaaacaggttccagccctcgtgctgcagaatgggacgacgatgtaagctcagccacagaattgatccatttgatccattaacatctccagagctcacatgccaagtcttcgggatgcgggattcaggaaggaacttgaacgttttactagccgagcgtcaccagctcagatgcagctgagacatactcagtccaatctgactacttctgtacttttcctctccacccccaggaggctgggaatcccagtctggttttgtcgagataaattgaatagagtcatcacaggcaggtgacagtgtctgctggacggtccctggcatcgactgtgtgccagcaactgggctatatagcatccccgtctaggtcctggccctaaaacaaccttagttgcttgagatgctagaggaggacccactcagtcccgtaggcccttctgaaagtctgatccctgctaagagtcactactacctggtacagtactaacaggcggcagcaggggtactgtatacatgaggtcctgggcatatttcagtttgccagtgcctcacatagatggcagcctgtccagctgaagacacggggtgtgcttgggggctcagaagccaagtgaggaatgggcatagcggtgggcgtacaccccaggatagcactcacttctagagggataggtgtgcaccttcacagagggacatattctgtaaatcgcggctccagctcatcagagctgtccagtggttttaaagtgtgctttttagagggagcattttatcagcttattaatcccagagtctactggagagttttcttgtggaaagagtatttaaaaaaaacaaaacaaaaaaaaaacaaggtcttaaatcgcacagagcaaaaaagacttccttttatgggcagccctggaagggctgactctgggatgatttaaaagaggcatcacatggcttgtttttactgatgtcacctcatccctaccctgcccgtggcacctcctcagccccaccccccacccctggccacggggcttggggccagacacatctcatgttcttgcccccggttgcacttttctattcagggctaggcctgtcagccagagaggaaattgcagcctggccacggagctaagctccttgtgtctgcttcccattccgattaatccttcgggaaatgatggggaccggggagaacaagcttctgcagcagctaaccagagcaagccggctcaggagatctgactgtctgtagacagtcgggagagcgccgtctgctagcaagaccatggttacttacagtaaagctgcattgtctgacagcctcacgccgttccagctcactccctgtgtgacttcagacaaatgatcaaatgctgtggttggtgcttttcccttatgcatacaatgaggatgtgttgtaatcattggagtaaagagacatctctggctctcggggactgacgtgactcccgggcctagagcttttagtacctacctgcaacctgtcatgtgccactaggaccagtcacttagagccagtgagaatacctagttagcctggtctttggtccagtttgttttcctccgtcgagacattggccacttaattgggatttttctttacctccagaggagtaggcagtaaatattgtaaggttcctagctaaacagccgctgtctcaactactcagcctacaaaggagcttagaaacagccacaggtgctgtgtaaccagctctgctctggtacaattccgctaacaacaggctccaagctgcacctggctccgctgtaattggttggcttcaccctgggcctccagagtgcttaattcttggaggtggatctccaatgcaccttttttcagttttaagataactaccttccacctggcctgacttgatcctacagagtccaaggaagctggccagatgggcaagagtggctttctctgcacaggcaacttcatgcctaccaataggttgctttcacacgcctttacccctgtgggattatttgctttgtaaagaagtgtcctggtggcccagtgatcagcctggtagaatgttagaagcctgttcagggtgctttgagattcctatatgttcgaacttccatttgtgggttttagtgtaaagcgtctgttgagccaggagtttttataaaacacagtttcctggaggagcataggtggagagtgctttggtctcacacgcctgtgattgagagctgctaggtacccctttccctcagaatcatgaccaccctgtccttgttttctgtcgggcctgtgtgtctgtccatccgtcagagcccaggtgtggttcactgcatggcctgggttgcagaactatgacttgacgagggcatcaagggaatgaacaaagagtgtgcacttgggtatagagaaacggggactgcgtggactgggctctggaagctcagtatgtttagcgtatatatttgaacagagaggcagattactgcatgcagataaacaaggaagcaggattattatatacagctgaacatggaggcaggtttagccatctctgcagggaagccgtcttgaggctgtaaacttccaggggaaggacgtgacagtggacatattctgcacacactgtcagcacttgcaactcggacctcaggggaaggctttaccatctctctaagcaagcatcactggggtagactttgccactcccatgggactggggcattggggtccttgacatggccttgcacgtgtcagcaatacacaccttcacttgcttagggtctcctccactgtctactcccaggcctttgctggtcaggacggtggctgcatgagcagcctttctcttctgtcctgtgtgccagctggcccatgtaactctcgaggacgaggaagctttgcaaaggtttgtgaccttgtgggagtgatggaggtacgtcatgggctttatactgtttttaccttggccttgtttgtagaagaaaatgatgcttaggacttcccttggttcgttggcatccgacttgaagtttctattagaactctgctcctgggcatcctacatcttcaagacagggatcttccttcatgggacatcctcagtgagcaggtgctggcgtgagatagcaagcttgggatatgtgctccgtctgtctagcacccctgccgcctcctccctcaggcccactgccaggggtgccctggtgccaggaagaaacttagaaatagccctggtgtgagatacagagaatggtgcctgtcaggaaagctgtgattctcattagtgagagagagaggtttcctcttctggttaatgtgtggccagaagaggtgcttagacaggaagtgggttttatctcttagcagtgctatcattaatacaaccgtccatggtggaatcggtgaaccaagacttgaagtgagtctgggcttggcactgtggctgggcctgggttctgggcaagatacatggcaggatgccagaggcatccagatgggaagcagagagtgcagaggtggtacagttcttctgggtctctctggcagctcattcctttcttccccatcactcccttaggtttgaacttatgcgcatgtgctggcagtataaccccaagatgcggccctccttcctggagatcatcggcagcatcaaggatgagatggagcccagcttccaggaggtctccttctactacagcgaggagaacaagcctcccgagccagaggagctggagatggagctggagatggagcctgagaacatggagagcgtcccactggacccttcggcctcctcagcctccctgcctctgcctgaaagacactcaggacacaaggctgagaatggcccgggccctggcgtgctcgttctccgcgccagttttgatgagagacagccttacgctcacatgaacgggggacgcgccaacgagagggccttgcctctgccccagtcctcgacctgctgatcctcggacacaccgaagcacgcgccaacagtaacgtgtgtgcgcccactcggtgggcgggggggcggggaggggagagcaggttgtaacaatctattcacaagcctcctgtacctcagtggatcttcagacctgccattgctgcccacgggagacggcttctctgcagtaaacacatttgggaccttccttttttcaatatgcaagcagctttttatttcctttacccgaacccttaactgacatgggcctctgcaaaccttaatgacaacacttaatagcaacaggacactcgagaattgagtctcttcgttctctgcctttttctctcctctgccttccctctctgccctctccccttccacttccacgctctcctttctctcttttctgctttacagtggaaaaatgtttgtgaacgcccatctgggaagccttcttttttaaaaaaaaaaaaaaaatcagattgacttaatggctgcccctggggctcctcatcaccccgcatacacctgcctgacaccgtaggtcttttaaaaaaaagaaaaggaaagaaaaagaaaaaaaattcacacactgagatggaatttttttaaccttttttagggtcaccccaaaatttaaaagggccattgttcatccgtggctatcatttttcacgctgccatttttgccaaaatcctgttttcggtttggtttttctcacacgcatatactccctgcgctgatttccctttgtccagaggcgtgggatgaaccatggtgtctggttgatgataacatttgagagacacgtgctgaggccccccactgtgcccggctctcccagcccacatctcctgggtctcgttgcatggttaccgtttgggagaactggacaagatggaactcgccctccttgaagaaggggaaagcagaactggttctccacccctcccccacccacagcaccccaagaattctggaggaagtggccatgggcaagcttgaaggtcaggttgtgggtcaaggtggtcctcacaccagcctcgtccccctccccgacctccctcctgcccctcccctgagggccacacactcgaaagggttccggggactcggcctggctgttggttatggatgttcgaggaagggattcagagccacagcagcctggagccgcccgcccaggcagtggatccaagcagtgtgagctttcacatggtctgttactaggacttcttcatgggtctctcagttctatgttagaccgtgaaacatttgcatacacatcgtctttaatgtcagttttataacttttttacagttcagatattcatctatacatctgtacaggaaaagaaaagctgctattttttttttgttctttatctttgtggatttaatctatgaaactttcaggtctaccccttcttcctttctgctcactccaagaaacttcctctgcttatcactagagtgtggtttttcttcctcttctccggcaactgatgcttctaggacataacttgccgtgaactgtttgatgccttttttataaatacatctcccttcccctgctccctgcagccccattcattaccctctaacccataggctctgtgagcacagtcacaggtgagggagtggggagggtgggagtccagagcccacagactcctgggccctactctctcctttccttgcttccccgcacacagcatctgctccagggcaaggcatgccacaaactcaggtcagaaacaaaaaggttaaaaatcccacacatcctggtttagtgtttctagtccctgttgttgaaagtcacactttgctttctctccttgctttggttcacacacacacacacacacacacacacacacacacaccccaatttgggaatacaatagcagttttaactgcagacaatagtcattggattattatttaaatgaatatttgatctttcacacacacacacacacacacaatagctgctgagtccccaggatgcagcagagctggtccagtggcccatctgccacctccttcacaagcaggcccacctgtctttagaaccagcttgtctgaaggggtggcctccctgggagcaagatgtaagacaccaactccccatggccaggagcagcaactttagtgggtgtgctataaagcccactcccgggccggaaatcccaaagtggagtagagctgaccctacagtggccctagagccccttgctgttcctccttaaccagaatcccggagctctgggcttggaggcccctccccctggagtggggttgggggaggggtcctgtcttgtttcgatttagcacttcttaccagagcagtgacagcgcgagagatgcttctgggtggaaatatttaaattaggagtaggaaaactgttggatgatgatggttgcagttgtgactggagattagatgcaggaaggaaagctggagttgtctggcttgtctgtaggttcaggcttgtggctcttcctagcctctgcccttaaagggaaaaggaggggggaagcttattaagaaggtatttcatgtaggagttttaatttattttgtgatacctgttttaatcactgtagaaaagcccctgttatggatttaaatgctgaggaaagggtacatgtatctctgtgtatgtgtgtattagatgggacagttttggggggtttttttgggggggcttgtttttcaaacatttatctacctcactcttgtttttcatgtgtgtgtgtgcatatatatatatcacatatatatatatatatataatacatctcacacttctcagtacctgacagtaggccaatgatcctggtaacctcagccactccgcaggccacatacccaggtgaagcagagaggggccaggctggattctggggttaaagcaacgctaactcaaatgagcagcctcttcctgctctgtctccaaaagcccacttttcctagggcaactctggtctttctcctcacctggtcccctacttttcaacccagcagtcaccatgagcacagcacgccagtggaggggggctccccggcccatcctcagctggctgactttggaacagaactttctctacagattgaatgactgacaaattctatccctaagagagcaggtactcccaggttttgagggcaggaggcacccacacgtaggttgtcttgagagtcccaatgtgtgcacatgtcagggtgccctgtcagccccctcagctgctcctctgagacctgcaccgaggcaggggcatgccaccattgctctcctggcattggttcctcttggaggtacagcggtcagggagctcccccttctgcttctgacagaaggccagtataaaaaagggggcaagacgaagcctgtgccccctgcaggctgctgtccttccctcttcttccctcccttccccccccccccccgcaacccccagggctaaacaaggactgaccaaatcttgaggctggaaggccagtggttggcgcctagccttccccgtgctctgcctctgtccacccatccgtctgctgctcacaggtggacagtgcaatcctcaactccagcagctgctcttacaggccctggggacttcagctggggaccgcggtggctaatcttttcccccagtatggagaaactgcctaacagttcggttaagctcaggagcccttcgcctcctgctggaatgctgcccttctctgggttcctagatgctcacagggtcactgggagatactgtttgatcagggttttcttctacactgtaggtgacactctgggatagtggcctatcctctcgcacatacctgccggttttccacaactggatttctacagttcattcaattgattttaagggtttttttttttccttattattattatttttgaaactgtccgagttgttggtgttttgtttttgcgtgggtgttatttttttttttcctttaagtagagagacggcaccaacagcgtagtggccgtcataaactaatgctccagaaacacttcaataaaaagaaaaggttggcttgtacgagggtgcagtcgttctgctggactgacgcgccccgactattgcaaggcatcatatccacagttctagcctgatctcatgctgatgttccccgcctcttcctgatttttctctttacaagcttcaagtactcctaccaagctgagtcgtggcctttttcactcgagcccacccccacccaacccccccttctgataggagctcacactgcttgaagtcacatgaaccactgaggcacagcatgcaggtgacgtgaacatccaggtgtgcccccacacagcccttcctgaggcgtggagatagagctgaacctgagctgggtggggcccacgcttcgccatctcctttcaggaatgtcctaacattggattcagagatgggatgaggctccctccttgagatataaaagactgttcaaggttgctctttttcctacctgcctgtttcttatgactcgggactgttcaacggtaggaaaagcagcttcataaactagaaaagcgatcacggtgagacgagcagatggcggagtggtatacaggagtttttagggtgggctgacagatggatgagctctgtatgatgccaagtcctaagccagcctgagctcccggagcctcggccttagcagcccacctcttttggcagtgcctgtgcctgaggtaagcaagcagtggtggcaaggtcacactgagctcatgtgggtgaggagtctaggatgcttacccaaggccctctgttgtcatcgttgggtcctctgagagtggccacagagtgctgaaagcatctcctttcctaaacactggcatccaggaggagacaggaccactccatcaaaatgctttggcccattttagcagtaatgaatttacggtttgggattttttttttccctttggtttttgtttttaatgttacttttatgtttgtctgatgtcttttcatttcctgggctaagcagctgcattgggagacctggaccagagagatccaccccttaagaaccagtgatgatggtcaaacttttaacagtccactttgaactaggtggtggtacaaatgagaacttcaagacaggatgtctgtgtaaaattgaacctctcttgccagagatgctgaagatacagaccttggacaggccaggggtctttgctttgggcttccagcttggatgaccagttggcgatttagagaaacgaacattccttgatgggatgacagagtgacggtgcagtaggcacccttggtaaccggcatcgtgacatgacgggaattgctgacagagggttaaagggcctggaagaagcatggaccatatttggacttgatggtgtctgaaggtgtcagagcatgtggaggctggggagtcaactgtgggcatttggtttcagataagacacttggcatcctgctctggaaacttctccttagagctaagtcacgtgcggaaggactcagactccatcacactcatcagatgagttgtcggtctggggcatgacgttagggattgatttgattttggtttctgtgagaacttcataatcactgatttgtgtgtccacatttgtgtctgcatctttccagtaaaccattctttaaattactcattatcctttcaatagggcttctaagtccagtagattacgggtagtcgttgacgaagctctggtttacaagaactaattcaatgtttcattgcatttttgtaagaacatagaataattttataaaatgtttgtagtttataattgccgaaaataatttaaaaacactttttttttctctctgtgtgtgcaaaaatatgtgtttgtggtctttttttccccctctttgtttcctttttcttttttgacacttgtttactagctagctttacaatatgccaaaaataaaaaataaaaacttaaaaaaattaattaaaaagaaattctccccaggaccaattgtggttcaccctctttcccacatgctttctgctctagtttgtaaaaaaataaataataaataaataaaacaaaaaaaaataaaacagataaaaataaaaacaaaacaaaaggaatgccagtggtttaaaaagtacttctgtattcttcagtatcttgatcttggaaccctttgctggggaaaggaattatctgggactcactgttccctgtggagtgtagcagcccaaacagatggaaagaactgctggccatggaaatagcagtgtgtggccacccagcaaagagatggcactccatggtgacatctggctggtatggctggtcctagctctgcaacactatggagatgggagggtttcaggacactggaatggcttcacagtgatcacatgactctgatgtgcagcccgtgggcacatgtgcctcagatcctaacgaatgctgtgcctacctgtatctaatggcgaacgccgaaggtccattgttttctaatacagaacaaactggtaacaaaaaccacaatgtgtgtcccctcgcccccttttttcaaattaagatccatgtcctttggctccccgtgcattattggccatgtctctctggttccacaagataccgttgttgaaaacacatggaactttctaacactgcaggaaaaaggtctgggaaccatttgtgggtttggtttggtctttcagtttcttgtgggtgttgggcagtgtgcagacacatgtacaggtggagtaggtgcctgcctggtgacaacccctgtctgcttcctatgccagtgaggttgaagtaagagttttgccagagttcatctacctctgggatttaaaaaaacaaaacaaaagtcaaaaggctcgatggagcggacacatcgccaataatgcatttctgagttttcttgttaaattttttcttaaaaaaagaaaaaaaaagtctaaaaaagataataatatggccaatttgttacataaaataactttctgtgtataaattattcctaaaaaaaaaaaccctctgtttatatataaaagaaaatcagtagatgaaaaaaaattcaatgtttttgtatattctgttgtaagaatttattcctgttactgcgacatactcgggattctttacattatgaaaaaagaaactttgtctattttgaatggctaaagctaaggccacttgagtctattactctgcttttttctagtagttaaagtaccacatggattaagttaaataaaagaattctgtatgcacctttgtctcccagttggtttcctcttcactctggaaccatcccccacttcctcgggaagctaagcctcgtgtgtgtgtgtgtgtgtgtgtgtgtgtgtcactcaggaatgctcagcacgagaactgacagccgggaagctgagcctcgtgtgtgtgtgtgtgtgtgtgtgtgtgtgtgtgtgtgtgtgtgtgtgtgtgtcactcggggaatgctcagcacgagaactgacagccgggtttctccaaatgcaaattgctgttgagtttgaagaaagctactttcccctcacttactcagctagaggaaaatcaggaggcatgaagcacaagtctcagggctgcttcacaggcttggcccctggaccttgggttgacaaaaggccagggtggctttggtatgtgtgagtctgggggtggggcggggttgccagaaacttgcgtgctgcgtgcattttcctgtccttggtagtgcttcacagttggggtgcctgagggtgctggagagagaaccaaggaaaatcgggctgttcctggctgcaaggtgctgagtcgttaggttgcccacaggtaactctgagatgctggctctccatctttgccatgggaaggtgatgaatggtttgggttggaaaatcaaccaagccatacattctagactcctgggagagtaggtagccgcctcactgaacactgagaatgggggaactcagtgacaaaatcaggacaccgggtgaagaactgatcgatgagacataggtggcagaagcaaatcagaggcaactcaagacccagtgagcctcccagtagcctaacccaatgggtatttggatttatagtcaaaaggtcgttggaagagcacaccttccaatctcgtcctgccccgggggttttgtttaccagatgcccagggagcttcactagatgacgctgaaggtcttatttctgtgctatcctggattggtactatgcctccagtttaccaaaaacctgcctggccggagccagctgcttttaaggatgaaggtactagactttttttttttttttttttttaagatttatttattatatgtaagtacactgtagctgtcttaggacaccccagaagagggcatcagatttcttacggatggttgtgagccaccatgtggctgctgggatttgaactcggtgaactcgggatcttcggaagagcagtcggcactcttaaatcactgagccatctctccagccaggtactagacctttaaaagactattaggaatcgagagattgctcagaggttaagagcacgtgtgctctcccaaaagaccagggttcaattcccagcacctacatggcagcttacaattgtaactccagttccaagggatccagatctaagggtgagatacctttacactaatacacataaaattaagtctttttttttttaagttaggtgctctccttggagtctgagacactttttttttttaatctttctgaaatatcgtttctctgtgtagccctggctgacctggaacttgctctgtagaccaggctgtcctagagcttagagagccacctgccttcctacggagctttgtcattaaaggcatgtgccacccctgcccagctaagtcacctattacgagcgttctagaattaatttattattcgtttttttaaacacctgcttactagctagattcataatatactgctgcccacccacctcaccccccccccaaaaaaaaaaagcaaaacaaaaaaagatattcaagccacaagctgagggcccatactacacctttttcttttttttctttcctttttttggctggtgtgttgttggtgacacattctctgggtagtcagaaccaggactttttattagtcgggtttatagatgaacacagagccatgcttcagacctcccaaccattaaatgaccagcaaaaaaacagtgttctacactggctcgcaagcatacaaaccacccactatcagctgtgactgaacaggatgcagtgtgtattgtcgggggatgccaagctatttacaaaaaatacaatgcaaatgggcgcttagggtcttgagaaactggagaggcgcagagggggtggaagagctgctcatgggggttggggtctgggcctctgttttttgaaacagagtttctctgtgtagccctggccttgagctcagaaatccacctgcctctgcctcccaagtgctgggtttaaaggcgtatgcccggcgttttcttttaatgtgtctgaccaggtgccaagtgacctgaagtgtcactagagcccactcctggaacaaagggacctaaggtttggagcaggagctctttgctcacagagaggggtctccagccaaggcaccagccaagcagctaggttctgtgctggtggcctgtgccatcccagtccaccttgggctttttttgtttgtttttttgtttttttcgagacagggtttctctgtgtagccctggctgtcctggcactcactttgtagaccaggctgtcctggaactcagaaatctgcctgcctctgcctcctgagtgctgggattaaaggtgtgtgccaccacgcccggcttccaccttgggctttgatctgccttagtgtggcttggctctgtcatatgtaaaatgtccttggtttatttgcaaaggaaatcttgtaaagtcattttnnnnnnnnnnnnnnnnnnnnnnnnnnnnnnnnnnnnnnnnnnnnnnnnnnnnnnnnnnnnnnnnnnnnnnnnnnnnnnnnnnnnnnnnnnnnngtggctctttggagttacaaaggtcataacttcccctagttaatcctttatgaagcatccgcctttggggattttcttcttgctttagacactaaagtaagattgtgattctgtgagtccacacccccacccccacccccacccccagccttgtaactgtttcccttttttagagcctctcatagcacagctggcttctccgtccaagcctgaaacactccatttcatctaaggaaggcatccccctgctgcttcccttaagctgctgtactttgagtctggactttcccgatttcttccagcatttcttggatgatgactcgcaaggctttgcccagaaggctggccgagagccagtgcgacagaggagggacatggatgagagccgcatgcccagtcccaaggtgcagagacaggtagtaggtgtaatcgcagatgtacctgcaaccacatgaaactccccattactcccagatcttgtcgatgccagacacagtaagtacaggtttcatgaagcatgagtttatggatgcccacatgcctagtaccacttgagtttggctcttctgatagagaaaggacatggcctaagaacactccagacagacattggttcttgggctcagagtctaatgaccagcaagcggtcatgacagaattgagccggcctttcaaacaactagtggtaagacaccttcaccacaatgactcccttactgccaactcccctcgggtatttctttatccctagaagagaggaaaggtgcttagggggaggggctgtcagcgtttggagaagaggttaaattaatctgcagtgcctgtgacaaataggatgcctgtgaccaaagcagccacatggacaacataggatagcctcttgaggagagagaagggactctgaaggataatccctctctcccatctgtttggcacttggcacacggagtcctgaagtacctgcccgcatctcgggaaaaggccacttcgacattctcaacagccacacgccggcagacctccttcatgttgacaacagacagcctcacttcggggccaccggggaggcacactccatcctccggctggaagcctcttacatctgaatcccgatagcctcggttcttaccacactgttccagaaagatggccttggcagaagagtccatgcccacatgcacaacaagctgtagggacatacatatcagaaatcccaggacagacaccagatcactagatgtgaagagaggtccagtgatgacagagccccgctaaacagatctagctccaagtcctccaggagccctgcttaggcccctaagtaatggtgctgatacaaaaggaacacatctttgggttgaattaggcatgctacatctgcatttaagg

SEQ ID NO: 1027 - DNA, 4907 bp, Mus musculus
ctcacagtgtgcccaagtgtgtgcgggaagcgagcctgcaccgagaacaacgagtgctgccacccggagtgcctgggcagctgccacacaccggacgacaacacaacctgcgtggcctgcagacactactactacaaaggcgtgtgtgtgcctgcctgcccgcctggcacctacaggttcgagggctggcgctgtgtggatcgcgatttctgcgccaacatccccaacgctgagagcagtgactcggatggcttcgttatccacgacgatgagtgcatgcaggagtgtccctcaggcttcatccgcaacagcacccagagcatgtactgtatcccctgcgaaggcccctgccccaaagtctgcggcgatgaagagaagaaaacgaaaaccatcgattcggtgacttctgctcaaatgctccaaggatgcaccatcctgaagggcaatctgcttattaacatccggagaggcaataacattgcctcggagttggagaacttcatggggctcatcgaggtggtgaccggctacgtgaagatccgccattctcatgccttggtctccttgtccttcctgaagaaccttcgtctcatcttaggagaggagcagctggaagggaactactccttctatgtcctagacaaccagaacttgcagcagctgtgggactggaaccaccggaacctgaccgtcaggtccggaaagatgtactttgctttcaatcccaagctgtgtgtctccgaaatttaccgcatggaggaagtgaccggaaccaagggacgccagagcaaaggggacataaacaccaggaacaacggagagcgagcttcctgtgaaagtgatgttctccgtttcacctccaccacgacctggaagaaccgaatcatcataacgtggcaccggtaccggccgccggactaccgggatctcatcagcttcacagtttactacaaggaggcaccatttaaaaacgttacggaatatgacgggcaggatgcctgtggctccaacagctggaacatggtggatgtagacctgcctccgaacaaggagggcgagcctggcattttactgcatgggctgaagccctggacccagtatgctgtctatgtcaaggctgtgaccctcaccatggtggaaaacgaccatatccgtggggccaaaagtgaaatcttgtacattcgcaccaatgcttcagatgtcctctcagcatcaaactcttcctctcagctgattgtgaagtggaatcctccaactctgcccaatggtaacttgagttactacattgtgaggtggcagcggcagccccaggatggttacctgtaccggcacaactactgctccaaagacaaaatacccatcagaaagtacgccgatggtaccatcgacgtggaggaggtgacggaaaatcccaagacagaagtgtgtggtggtgataaagggccatgctgcgcttgccctaaaactgaagctgagaagcaggctgagaaggaggaggctgagtaccgtaaagtctttgagaatttccttcacaattccatctttgtgcccaggcccgaaaggaggcggagagacgtcatgcaagtggccaacacgaccatgtccagccgaagcaggaacaccacggtagctgacacctacaatatcacagacccggaggagttcgagacagagtaccctttctttgagagcagagtggataacaaggagaggactgtcatctccaacctccggcctttcactctgtaccgcatcgatatccacagctgcaaccacgaggctgagaagctgggctgcagcgcctccaacttcgtctttgcgagaaccatgccagcagaaggagcagatgatatccctggtccggtgacctgggagccaagacccgaaaactccatctttttaaagtggccagaacccgagaaccccaacggattgatcctaatgtatgaaattaaatacgggtcgcaagtcgaggatcagcgggaatgtgtgtccagacaggagtacaggaagtacggaggggccaaactcaaccgtctaaacccagggaactatacagcccggattcaggctacctccctctctgggaatgggtcatggacagatcctgtgttcttctatgtccccgccaaaacgacgtatgagaacttcatgcatctgatcattgctctgccggttgccatcctgctgatcgttggggggctggttatcatgctgtatgtcttccatagaaagagaaataacagcaggttgggcaatggagtgctgtatgcttctgtgaaccccgagtatttcagcgcagctgatgtgtacgtgcctgatgaatgggaggtagctcgagagaagatcaccatgaaccgggagctcggacaagggtcctttgggatggtctatgaaggagtggccaagggtgtggtcaaggatgaacccgaaaccagagtggccatcaagacggtaaacgaggctgcaagtatgcgtgaaagaatcgagtttctcaacgaggcctcggtgatgaaggagttcaattgtcaccatgtggtccggttgctgggtgtggtatcccaaggccagcccaccctggtcatcatggaactaatgacacgcggtgatctcaaaagttatctccggtctctgaggccagaagtggagcagaataatctagtcctcattcctccgagcttaagcaagatgatccagatggctggagagattgcagatggcatggcctacctcaatgccaacaagttcgtccacagagaccttgctgctaggaactgcatggtagccgaagatttcacagtcaaaattggagatttcggtatgacacgagacatctacgagacggactactaccggaaaggcgggaaggggttgctgcctgtgcgctggatgtctcccgagtccctcaaggatggtgtcttcactactcattctgatgtctggtccttcggggtcgtcctctgggagatcgccacgctggctgagcagccctaccagggcttgtccaacgagcaagttcttcgtttcgtcatggagggcggccttctggacaagccggacaactgccccgatatgctgtttgaacttatgcgcatgtgctggcagtataaccccaagatgcggccctccttcctggagatcatcggcagcatcaaggatgagatggagcccagcttccaggaggtctccttctactacagcgaggagaacaagcctcccgagccagaggagctggagatggagctggagatggagcctgagaacatggagagcgtcccactggacccttcggcctcctcagcctccctgcctctgcctgaaagacactcaggacacaaggctgagaatggcccgggccctggcgtgctcgttctccgcgccagttttgatgagagacagccttacgctcacatgaacgggggacgcgccaacgagagggccttgcctctgccccagtcctcgacctgctgatcctcggacacaccgaagcacgcgccaacagtaacgtgtgtgcgcccactcggtgggcgggggggcggggaggggagagcaggttgtaacaatctattcacaagcctcctgtacctcagtggatcttcagacctgccattgctgcccacgggagacggcttctctgcagtaaacacatttgggaccttccttttttcaatatgcaagcagctttttatttcctttacccgaacccttaactgacatgggcctctgcaaaccttaatgacaacacttaatagcaacaggacactcgagaattgagtctcttcgttctctgcctttttctctcctctgccttccctctctgccctctccccttccacttccacgctctcctttctctcttttctgctttacagtggaaaaatgtttgtgaacgcccatctgggaagccttcttttttaaaaaaaaaaaaaaaatcagattgacttaatggctgcccctggggctcctcatcaccccgcatacacctgcctgacaccgtaggtcttttaaaaaaaagaaaaggaaagaaaaagaaaaaaaattcacacactgagatggaatttttttaaccttttttagggtcaccccaaaatttaaaagggccattgttcatccgtggctatcatttttcacgctgccatttttgccaaaatcctgttttcggtttggtttttctcacacgcatatactccctgcgctgatttccctttgtccagaggcgtgggatgaaccatggtgtctggttgatgataacatttgagagacacgtgctgaggccccccactgtgcccggctctcccagcccacatctcctgggtctcgttgcatggttaccgtttgggagaactggacaagatggaactcgccctccttgaagaaggggaaagcagaactggttctccacccctcccccacccacagcaccccaagaattctggaggaagtggccatgggcaagcttgaaggtcaggttgtgggtcaaggtggtcctcacaccagcctcgtccccctccccgacctccctcctgcccctcccctgagggccacacactcgaaagggttccggggactcggcctggctgttggttatggatgttcgaggaagggattcagagccacagcagcctggagccgcccgcccaggcagtggatccaagcagtgtgagctttcacatggtctgttactaggacttcttcatgggtctctcagttctatgttagaccgtgaaacatttgcatacacatcgtctttaatgtcagttttataacttttttacagttcagatattcatctatacatctgtacaggaaaagaaaagctgctattttttttttgttctttatctttgtggatttaatctatgaaactttcaggtctaccccttcttcctttctgctcactccaagaa

SEQ ID NO: 1028 - protein, 1150 aa, Mus musculus
LTVCPSVCGKRACTENNECCHPECLGSCHTPDDNTTCVACRHYYYKGVCVPACPPGYFEGWRCVDRDFCANIPNAESSDSDGFVIHDDECMQECPSGFIRNSTQSMYCIPCEGPCPKVCGDEEKKTKTIDSVTSAQMLQGCTILKGNLLINIRRGNNIASELENFMGLIEVVTGYVKIRHSHALVSLSFLKNLRLILGEEQLEGNYSFYVLDNQNLQQLWDWNHRNLTVRSGKMYFAFNPKLCVSEIYRMEEVTGTKGRQSKGDINTRNNGERASCESDVLRFTSTTTWKNRIIITWHRYRPPDYRDLISFTVYYKEAPFKNVTEYDGQDACGSNSWNMVDVDLPPNKEGEPGILLHGLKPWTQYAVYVKAVTLTMVENDHIRGAKSEILYIRTNASDVLSNSSSQLIVKWNPPTLPNGNLSYYIVRWQRQPQDGYLYRHNYCSKDKIPIRKYADGTIDVEEVTENPKTEVCGGDKGPCCACPKTEAEKQAEKEEAEYRKVFENFLHNSIFVPRPERRRRDVMQVANTTMSSRSRNTTVADTYNITDPEEFETEYPFFESRVDNKERTVISNLRPFTLYRIDIHSCNHEAEKLGCSNFVFARTMPAEGADDIPGPVTWEPRPENSIFLKWPEPENPNGLILMYEIKYGSQVEDQRECVSRQEYRKYGGAKLNRLNPGNYTARIQATSLSGNGSWTDPVFFYVPAKTTYENFMHLIIALPVAILLIVGGLVIMLYVFHRKRNNSRLGNGVLYASVNPEYFSAADVYVPDEWEVAREKITMNRELGQGSFGMVYEGVAKGVVKDEPETRVAIKTVNEAASMRERIEFLNEASVMKEFNCHHVVRLLGVVSQGQPTLVIMELMTRGDLKSYLRSLRPEVEQNNLVLIPPSLSKMIQMAGEIADGMAYLNANKFVHRDLAARNCMVAEDFTVKIGDFGMTRDIYETDYYRKGGKGLLPVRWMSPESLKDGVFTTHSDVWSFGVVLWEIATLAEQPYQGLSNEQVLRFVMEGGLLDKPDNCPDMLFELMRMCWQYNPKMRPSFLEIIGSIKDEMEPSFQEVSFYYSEENKPPEPEELEMELEMEPENMESVPLDPSASSASLPLPERHSGHKAENGPGPGVLVLRASFDERQPYAHMNGGRANERALPLPQSSTC
